United States Patent Application Publication US 2016/0046990 A1 - sequence listing, part 3

SEQ ID NO: 76829 - DNA, 25 bp, Homo sapiens
gagttcaccagtacctgtcccagtg

SEQ ID NO: 76830 - DNA, 25 bp, Homo sapiens
ctctccagagttgcatgtaggtagc

SEQ ID NO: 76831 - DNA, 25 bp, Homo sapiens
ctgccatggggctcaaagtctttta

SEQ ID NO: 76832 - DNA, 25 bp, Homo sapiens
agacttcgccataccagcagcattg

SEQ ID NO: 76833 - DNA, 25 bp, Homo sapiens
gagcttaccctctcccttgaagttg

SEQ ID NO: 76834 - DNA, 25 bp, Homo sapiens
tgtgtccctggatcagcaatttacc

SEQ ID NO: 76835 - DNA, 25 bp, Homo sapiens
tggaggttgagacactatcattttc

SEQ ID NO: 76836 - DNA, 25 bp, Homo sapiens
gtctggcctgggaattaaatgtttc

SEQ ID NO: 76837 - DNA, 25 bp, Homo sapiens
cactggtcagcttgtggcttgtcta

SEQ ID NO: 76838 - DNA, 25 bp, Homo sapiens
tgactgactgtctagcaagaattgg

SEQ ID NO: 76839 - DNA, 25 bp, Homo sapiens
tggtgtcttacaatctgaaacttga

SEQ ID NO: 76840 - DNA, 25 bp, Homo sapiens
ttaagtactacaaaactgtttggtc

SEQ ID NO: 76841 - DNA, 25 bp, Homo sapiens
agggagatagggactctcacaaatc

SEQ ID NO: 76842 - DNA, 25 bp, Homo sapiens
ccagaaatgaatgaggttggttttc

SEQ ID NO: 76843 - DNA, 25 bp, Homo sapiens
cggcctctgtcatgcttgtgaaata

SEQ ID NO: 76844 - DNA, 25 bp, Homo sapiens
gcctctccgattctagtactacatg

SEQ ID NO: 76845 - DNA, 25 bp, Homo sapiens
tgcctggccagatgacgtattttta

SEQ ID NO: 76846 - DNA, 25 bp, Homo sapiens
aaactgcagtgtacatttgttgaca

SEQ ID NO: 76847 - DNA, 25 bp, Homo sapiens
agattgtttttctttcaaatatata

SEQ ID NO: 76848 - DNA, 25 bp, Homo sapiens
gaactaatataacccatttgtttct

SEQ ID NO: 76849 - DNA, 25 bp, Homo sapiens
ttggtgcaaacacttagtacctgta

SEQ ID NO: 76850 - DNA, 25 bp, Homo sapiens
gagtatgctgctctcctcagacatg

SEQ ID NO: 76851 - DNA, 25 bp, Homo sapiens
gacgggctatctgggttaaaatata

SEQ ID NO: 76852 - DNA, 25 bp, Homo sapiens
gtaagacatggcttcatctgcacta

SEQ ID NO: 76853 - DNA, 25 bp, Homo sapiens
caggcctgtgccttgctgcaataaa

SEQ ID NO: 76854 - DNA, 25 bp, Homo sapiens
ccatttgggtagaactcttttagta

SEQ ID NO: 76855 - DNA, 25 bp, Homo sapiens
gtgtctgatgacactgcagagtttg

SEQ ID NO: 76856 - DNA, 25 bp, Homo sapiens
ttgtttcaagaatagtgacaggagc

SEQ ID NO: 76857 - DNA, 25 bp, Homo sapiens
gaagtatgtatcgaacaaaatcaat

SEQ ID NO: 76858 - DNA, 25 bp, Homo sapiens
gagtcaccctcatcaaaagtcaaga

SEQ ID NO: 76859 - DNA, 25 bp, Homo sapiens
gccattttcctttacgagagctgta

SEQ ID NO: 76860 - DNA, 25 bp, Homo sapiens
cgcgagtttctcattagccttatta

SEQ ID NO: 76861 - DNA, 25 bp, Homo sapiens
ttcgcacctctttaagttggcttta

SEQ ID NO: 76862 - DNA, 25 bp, Homo sapiens
actgagctcaggtgcacttatcttc

SEQ ID NO: 76863 - DNA, 25 bp, Homo sapiens
tgctgtcctcctggctcttaagaga

SEQ ID NO: 76864 - DNA, 25 bp, Homo sapiens
gtgtcttccatagtaccctccttga

SEQ ID NO: 76865 - DNA, 25 bp, Homo sapiens
cagtggcacctcctgggttatatca

SEQ ID NO: 76866 - DNA, 25 bp, Homo sapiens
ggcagcacctcacagccaatgtttg

SEQ ID NO: 76867 - DNA, 25 bp, Homo sapiens
aggcctatgccagtgaccaaatgtc

SEQ ID NO: 76868 - DNA, 25 bp, Homo sapiens
gcaggccttttcttgtggtatatga

SEQ ID NO: 76869 - DNA, 25 bp, Homo sapiens
cccttgattctttggtggaatgacc

SEQ ID NO: 76870 - DNA, 25 bp, Homo sapiens
gtcattgtttctgtcctggtgaagc

SEQ ID NO: 76871 - DNA, 25 bp, Homo sapiens
ccattcctttgtgtattgaaacttc

SEQ ID NO: 76872 - DNA, 25 bp, Homo sapiens
tcctcagggacagctacatcacatt

SEQ ID NO: 76873 - DNA, 25 bp, Homo sapiens
cagatggtttctgtaggaaattcta

SEQ ID NO: 76874 - DNA, 25 bp, Homo sapiens
tagcaaataaagctgtaaaccactc

SEQ ID NO: 76875 - DNA, 25 bp, Homo sapiens
taatccttattttcttatttctatc

SEQ ID NO: 76876 - DNA, 25 bp, Homo sapiens
gggccacagggtcatttagtctaga

SEQ ID NO: 76877 - DNA, 25 bp, Homo sapiens
ctttgtggctctgggaaacatatta

SEQ ID NO: 76878 - DNA, 25 bp, Homo sapiens
cctatcctgtgtttcaaagagtgca

SEQ ID NO: 76879 - DNA, 25 bp, Homo sapiens
ggacagtagttaaatgaataaaaat

SEQ ID NO: 76880 - DNA, 25 bp, Homo sapiens
tgagtcgctgcttcttttgttagtg

SEQ ID NO: 76881 - DNA, 25 bp, Homo sapiens
agcatgtggctcctgatatctattc

SEQ ID NO: 76882 - DNA, 25 bp, Homo sapiens
ttcctgttaaactggcgactgccca

SEQ ID NO: 76883 - DNA, 25 bp, Homo sapiens
tgcaggctctggcttgatatccctc

SEQ ID NO: 76884 - DNA, 25 bp, Homo sapiens
cctccggcagtttggaaaggtcctc

SEQ ID NO: 76885 - DNA, 25 bp, Homo sapiens
aggttctggtgacatactgcctacc

SEQ ID NO: 76886 - DNA, 25 bp, Homo sapiens
tctgctgctgagaaaaacctggtgc

SEQ ID NO: 76887 - DNA, 25 bp, Homo sapiens
tggcggcagcagagaaattgcttta

SEQ ID NO: 76888 - DNA, 25 bp, Homo sapiens
gataacatcatggttcctaaggctt

SEQ ID NO: 76889 - DNA, 25 bp, Homo sapiens
gtgttcttctatgactaccctctaa

SEQ ID NO: 76890 - DNA, 25 bp, Homo sapiens
tattttctatgcaagtgaaaatata

SEQ ID NO: 76891 - DNA, 25 bp, Homo sapiens
caagagctcctgagtgctgtttcta

SEQ ID NO: 76892 - DNA, 25 bp, Homo sapiens
ctgcctcatcttggaactgtctctt

SEQ ID NO: 76893 - DNA, 25 bp, Homo sapiens
cagacaaatctgctggtgactatta

SEQ ID NO: 76894 - DNA, 25 bp, Homo sapiens
actaatctgcttcaatcttcctggg

SEQ ID NO: 76895 - DNA, 25 bp, Homo sapiens
ttgcctaggtccagttaccatgatc

SEQ ID NO: 76896 - DNA, 25 bp, Homo sapiens
tgtaatagaggaaaacatactgtat

SEQ ID NO: 76897 - DNA, 25 bp, Homo sapiens
gagactcattatttcccaaccagtg

SEQ ID NO: 76898 - DNA, 25 bp, Homo sapiens
ttgcccatcagagtgcctcagcttg

SEQ ID NO: 76899 - DNA, 25 bp, Homo sapiens
ctttcagggcacaaacagtagctcc

SEQ ID NO: 76900 - DNA, 25 bp, Homo sapiens
gccttgcccagttaagagtattttg

SEQ ID NO: 76901 - DNA, 25 bp, Homo sapiens
tgctagggcctgaactactactttg

SEQ ID NO: 76902 - DNA, 25 bp, Homo sapiens
aagcccactgtggtttctacctagg

SEQ ID NO: 76903 - DNA, 25 bp, Homo sapiens
taggtgtatgatttgccctcccatc

SEQ ID NO: 76904 - DNA, 25 bp, Homo sapiens
tggtggcctacatctgtcagctttg

SEQ ID NO: 76905 - DNA, 25 bp, Homo sapiens
ccacatggggatacgctggttttta

SEQ ID NO: 76906 - DNA, 25 bp, Homo sapiens
aggagccatcgcaatcttccatttg

SEQ ID NO: 76907 - DNA, 25 bp, Homo sapiens
catctctgtgggataaaagtggcta

SEQ ID NO: 76908 - DNA, 25 bp, Homo sapiens
ggtgctaagcaccaaaaggaccatc

SEQ ID NO: 76909 - DNA, 25 bp, Homo sapiens
ttctcgtggactgggctaaatccta

SEQ ID NO: 76910 - DNA, 25 bp, Homo sapiens
taataggagactttggcacagaatc

SEQ ID NO: 76911 - DNA, 25 bp, Homo sapiens
ccaccatttagggtattctatgaga

SEQ ID NO: 76912 - DNA, 25 bp, Homo sapiens
aacgtaacttgttggcatagataca

SEQ ID NO: 76913 - DNA, 25 bp, Homo sapiens
ttgcatggttcctcagtctaagacg

SEQ ID NO: 76914 - DNA, 25 bp, Homo sapiens
gaactcttctgcttctcgctgccta

SEQ ID NO: 76915 - DNA, 25 bp, Homo sapiens
ggttgctcaaatttcagtcctcaca

SEQ ID NO: 76916 - DNA, 25 bp, Homo sapiens
gatgccatgagtccagcctttgtta

SEQ ID NO: 76917 - DNA, 25 bp, Homo sapiens
gatacccgtttccatcttaccagtg

SEQ ID NO: 76918 - DNA, 25 bp, Homo sapiens
ggcatagtcatttctcccaatagtc

SEQ ID NO: 76919 - DNA, 25 bp, Homo sapiens
gctctcagtggatgtgtctctaaaa

SEQ ID NO: 76920 - DNA, 25 bp, Homo sapiens
attttactgtacaaatatatttgtg

SEQ ID NO: 76921 - DNA, 25 bp, Homo sapiens
gctgtcccatcgcaccattcttttg

SEQ ID NO: 76922 - DNA, 25 bp, Homo sapiens
tctcggagaacctgctaatggatca

SEQ ID NO: 76923 - DNA, 25 bp, Homo sapiens
gcattgtgcagctcaggtctcatta

SEQ ID NO: 76924 - DNA, 25 bp, Homo sapiens
ggcaggttctagtcagttacgtcca

SEQ ID NO: 76925 - DNA, 25 bp, Homo sapiens
tgggcctcatatccacctcaaggta

SEQ ID NO: 76926 - DNA, 25 bp, Homo sapiens
ctgagatggcaaaaacgagtgattc

SEQ ID NO: 76927 - DNA, 25 bp, Homo sapiens
gtgggtaccctctttactggatgga

SEQ ID NO: 76928 - DNA, 25 bp, Homo sapiens
tcttaagggctgagacaaaggcttc

SEQ ID NO: 76929 - DNA, 25 bp, Homo sapiens
ttgggcctagttacctagctaaaga

SEQ ID NO: 76930 - DNA, 25 bp, Homo sapiens
tgcacttcccatgtctctaagagtc

SEQ ID NO: 76931 - DNA, 25 bp, Homo sapiens
cttcagggaacaaaaaataggtttc

SEQ ID NO: 76932 - DNA, 25 bp, Homo sapiens
agagaataagaagactgccattatt

SEQ ID NO: 76933 - DNA, 25 bp, Homo sapiens
gtctcacctgcctgccacaattgta

SEQ ID NO: 76934 - DNA, 25 bp, Homo sapiens
ggctccagcctgtgatgttttgtct

SEQ ID NO: 76935 - DNA, 25 bp, Homo sapiens
caggctccagtgcatatattttgtc

SEQ ID NO: 76936 - DNA, 25 bp, Homo sapiens
aagtgccatcttccgttcttctaag

SEQ ID NO: 76937 - DNA, 25 bp, Homo sapiens
cccaagataagtggtagacaaccta

SEQ ID NO: 76938 - DNA, 25 bp, Homo sapiens
agcctgctgatatatggcagtatca

SEQ ID NO: 76939 - DNA, 25 bp, Homo sapiens
tgagcattctcctttccagtccagg

SEQ ID NO: 76940 - DNA, 25 bp, Homo sapiens
ttaaggcactagttgtaagcaattg

SEQ ID NO: 76941 - DNA, 25 bp, Homo sapiens
gacaatgactagtttgcatatgagc

SEQ ID NO: 76942 - DNA, 25 bp, Homo sapiens
cctgggagactgcagtaaccctcta

SEQ ID NO: 76943 - DNA, 25 bp, Homo sapiens
tcagggcttcttccaatatataatg

SEQ ID NO: 76944 - DNA, 25 bp, Homo sapiens
cctgggagctactgttcacatgtta

SEQ ID NO: 76945 - DNA, 25 bp, Homo sapiens
ggtctctatttttagtggcagaatg

SEQ ID NO: 76946 - DNA, 25 bp, Homo sapiens
acattgtggcctctcctgatgactc

SEQ ID NO: 76947 - DNA, 25 bp, Homo sapiens
cccagttggtttgtgaatgcttcag

SEQ ID NO: 76948 - DNA, 25 bp, Homo sapiens
ctattgacagagaccacccaggttc

SEQ ID NO: 76949 - DNA, 25 bp, Homo sapiens
cctggttgttttgaaatgttctgac

SEQ ID NO: 76950 - DNA, 25 bp, Homo sapiens
tgtatatttccagtggaatatgggt

SEQ ID NO: 76951 - DNA, 25 bp, Homo sapiens
ccatcccattggctttctgactaaa

SEQ ID NO: 76952 - DNA, 25 bp, Homo sapiens
gtcagtgatgacagaaagctatcta

SEQ ID NO: 76953 - DNA, 25 bp, Homo sapiens
tccaaggccttcctattctgaaatg

SEQ ID NO: 76954 - DNA, 25 bp, Homo sapiens
tgcttgccctccttttctacagatg

SEQ ID NO: 76955 - DNA, 25 bp, Homo sapiens
ggttctgtaccatcgcccttctgta

SEQ ID NO: 76956 - DNA, 25 bp, Homo sapiens
gtcatccaatgtagccttcaaaatt

SEQ ID NO: 76957 - DNA, 25 bp, Homo sapiens
ttgcccctggtaacagaggtacaaa

SEQ ID NO: 76958 - DNA, 25 bp, Homo sapiens
ggtcagcactgggagtccattatca

SEQ ID NO: 76959 - DNA, 25 bp, Homo sapiens
gcctaagtatgtgtgctgataaacc

SEQ ID NO: 76960 - DNA, 25 bp, Homo sapiens
cttgagcttagtgcaccagtacctg

SEQ ID NO: 76961 - DNA, 25 bp, Homo sapiens
gtgaccttatgtgttatgtagccca

SEQ ID NO: 76962 - DNA, 25 bp, Homo sapiens
agtagtctaaagtcaaatgcctatg

SEQ ID NO: 76963 - DNA, 25 bp, Homo sapiens
ttgaagcatggaaagctgtgagaaa

SEQ ID NO: 76964 - DNA, 25 bp, Homo sapiens
cacagagggctacaggagacagata

SEQ ID NO: 76965 - DNA, 25 bp, Homo sapiens
ggccagaaccagatcccacagtgta

SEQ ID NO: 76966 - DNA, 25 bp, Homo sapiens
cagttgtttgtgtctaagcccagga

SEQ ID NO: 76967 - DNA, 25 bp, Homo sapiens
gttccactttcaccaacaatgcatg

SEQ ID NO: 76968 - DNA, 25 bp, Homo sapiens
acaaacaaataaaacgtttgtttac

SEQ ID NO: 76969 - DNA, 25 bp, Homo sapiens
tgctttcccattgagggcgctcctg

SEQ ID NO: 76970 - DNA, 25 bp, Homo sapiens
acccggtgaagtagctctttctttg

SEQ ID NO: 76971 - DNA, 25 bp, Homo sapiens
ggctctgaaaagtaggtccactctg

SEQ ID NO: 76972 - DNA, 25 bp, Homo sapiens
gctgtccgtcaaaatgccaccttta

SEQ ID NO: 76973 - DNA, 25 bp, Homo sapiens
tgggctgctgccttgtgaaaaatgc

SEQ ID NO: 76974 - DNA, 25 bp, Homo sapiens
agaaccgccgtgaaactggaagtca

SEQ ID NO: 76975 - DNA, 25 bp, Homo sapiens
cttgttctcttgtgtgagtacttcc

SEQ ID NO: 76976 - DNA, 25 bp, Homo sapiens
gcaaagtggtcatttttcccaagga

SEQ ID NO: 76977 - DNA, 25 bp, Homo sapiens
agtgtccacaccaagctgttctcca

SEQ ID NO: 76978 - DNA, 25 bp, Homo sapiens
caggggcagagagttgatctattac

SEQ ID NO: 76979 - DNA, 25 bp, Homo sapiens
agtggttaactactccttttgtaga

SEQ ID NO: 76980 - DNA, 25 bp, Homo sapiens
gcaacctctgggtcattttcagtaa

SEQ ID NO: 76981 - DNA, 25 bp, Homo sapiens
ggagacaccttggaagttatcaatg

SEQ ID NO: 76982 - DNA, 25 bp, Homo sapiens
acctaaaaaggcactaaaatgcatt

SEQ ID NO: 76983 - DNA, 25 bp, Homo sapiens
aggaatgtcttccatccgtgctatg

SEQ ID NO: 76984 - DNA, 25 bp, Homo sapiens
ttacctcagtcgtgaacaaacgttc

SEQ ID NO: 76985 - DNA, 25 bp, Homo sapiens
ttaatcataagtggttagaggtatt

SEQ ID NO: 76986 - DNA, 25 bp, Homo sapiens
gtgtgaactcttgaaccctccctga

SEQ ID NO: 76987 - DNA, 25 bp, Homo sapiens
gctggcccatctgaattgacatctg

SEQ ID NO: 76988 - DNA, 25 bp, Homo sapiens
tttctcattaaattaaaaatattga

SEQ ID NO: 76989 - DNA, 25 bp, Homo sapiens
agttactttggatttatctatttta

SEQ ID NO: 76990 - DNA, 25 bp, Homo sapiens
ttgtgccacctagagtaatttttgc

SEQ ID NO: 76991 - DNA, 25 bp, Homo sapiens
agagtttcagctaggaggcacatta

SEQ ID NO: 76992 - DNA, 25 bp, Homo sapiens
tcaggtcaggggctgtcaaatttca

SEQ ID NO: 76993 - DNA, 25 bp, Homo sapiens
cgccagtggctccattagctctgta

SEQ ID NO: 76994 - DNA, 25 bp, Homo sapiens
tgggagactggacactatctgtttc

SEQ ID NO: 76995 - DNA, 25 bp, Homo sapiens
gcatttcctgcagagagagacctta

SEQ ID NO: 76996 - DNA, 25 bp, Homo sapiens
gcagaggcatgaccgcttaatttca

SEQ ID NO: 76997 - DNA, 25 bp, Homo sapiens
tgctggaacatttggcaacccttgg

SEQ ID NO: 76998 - DNA, 25 bp, Homo sapiens
gaatgcctacttcttccttgagaga

SEQ ID NO: 76999 - DNA, 25 bp, Homo sapiens
cctgatcaacgtccttgtggtttaa

SEQ ID NO: 77000 - DNA, 25 bp, Homo sapiens
catttgcgtgcttaaccctgtgcta

SEQ ID NO: 77001 - DNA, 25 bp, Homo sapiens
aattattggattttatttttcactg

SEQ ID NO: 77002 - DNA, 25 bp, Homo sapiens
ccagacagtttctacggttccagtc

SEQ ID NO: 77003 - DNA, 25 bp, Homo sapiens
ggcgtgtgtattccaggctgtttta

SEQ ID NO: 77004 - DNA, 25 bp, Homo sapiens
tccgagcgggttcaatattcttatc

SEQ ID NO: 77005 - DNA, 25 bp, Homo sapiens
tgcatcaccacaggcaggtctcttc

SEQ ID NO: 77006 - DNA, 25 bp, Homo sapiens
ttcattgaacgggagcgatgcatca

SEQ ID NO: 77007 - DNA, 25 bp, Homo sapiens
gggtcttattgtacaccacaccata

SEQ ID NO: 77008 - DNA, 25 bp, Homo sapiens
ggtcgcttggaggtttcagccaata

SEQ ID NO: 77009 - DNA, 25 bp, Homo sapiens
agtggctccagagtgttacacatga

SEQ ID NO: 77010 - DNA, 25 bp, Homo sapiens
cagtgcagtttcttctcatgacagg

SEQ ID NO: 77011 - DNA, 25 bp, Homo sapiens
acgatacatgcttcctgctgcttta

SEQ ID NO: 77012 - DNA, 25 bp, Homo sapiens
atgcccacgagagatgtccttttta

SEQ ID NO: 77013 - DNA, 25 bp, Homo sapiens
atgtctccgctattcatggcttgta

SEQ ID NO: 77014 - DNA, 25 bp, Homo sapiens
tcaccaacggtatcatgtaatcaga

SEQ ID NO: 77015 - DNA, 25 bp, Homo sapiens
gtaaacctgttataagaactaacgc

SEQ ID NO: 77016 - DNA, 25 bp, Homo sapiens
gaaccagtgtaccctaatgataatt

SEQ ID NO: 77017 - DNA, 25 bp, Homo sapiens
cgttgctacacacaaggcactggtg

SEQ ID NO: 77018 - DNA, 25 bp, Homo sapiens
ggccagtagggcacagcatctagca

SEQ ID NO: 77019 - DNA, 25 bp, Homo sapiens
agggactcctgttgctcctgaatca

SEQ ID NO: 77020 - DNA, 25 bp, Homo sapiens
acgcggtgcagagagttatttttta

SEQ ID NO: 77021 - DNA, 25 bp, Homo sapiens
tctgagttcctttgccttgtagaga

SEQ ID NO: 77022 - DNA, 25 bp, Homo sapiens
cctaccttgatgtaagctgttcctg

SEQ ID NO: 77023 - DNA, 25 bp, Homo sapiens
tgtctccgaatcctggaccctggta

SEQ ID NO: 77024 - DNA, 25 bp, Homo sapiens
tggaaactcacagctatgcacttgc

SEQ ID NO: 77025 - DNA, 25 bp, Homo sapiens
ctgtgacagtgctcaagtttggact

SEQ ID NO: 77026 - DNA, 25 bp, Homo sapiens
ccttaccctggaatgctgtgttctc

SEQ ID NO: 77027 - DNA, 25 bp, Homo sapiens
accaggagtgcctcgtatctcatca

SEQ ID NO: 77028 - DNA, 25 bp, Homo sapiens
gtggcagtggtagctctgtaatata

SEQ ID NO: 77029 - DNA, 25 bp, Homo sapiens
gcccacaggtttgtcatttgccaca

SEQ ID NO: 77030 - DNA, 25 bp, Homo sapiens
ttctcttgtccttgaacctgggcta

SEQ ID NO: 77031 - DNA, 25 bp, Homo sapiens
tcagacatctgtgagtctccctata

SEQ ID NO: 77032 - DNA, 25 bp, Homo sapiens
caaattgttaattcgccagccagca

SEQ ID NO: 77033 - DNA, 25 bp, Homo sapiens
ttcctgctagcagtagctgataatg

SEQ ID NO: 77034 - DNA, 25 bp, Homo sapiens
ggtactcatagttcaagccatcttg

SEQ ID NO: 77035 - DNA, 25 bp, Homo sapiens
cgtcgcctaaagttgttcttccata

SEQ ID NO: 77036 - DNA, 25 bp, Homo sapiens
actgttcttcttggtggtgctttac

SEQ ID NO: 77037 - DNA, 25 bp, Homo sapiens
cgacggagccttgagcaaagaaatc

SEQ ID NO: 77038 - DNA, 25 bp, Homo sapiens
gctgagcagatgaggaacgcattta

SEQ ID NO: 77039 - DNA, 25 bp, Homo sapiens
tagctgtccctgaaaaccgagagtc

SEQ ID NO: 77040 - DNA, 25 bp, Homo sapiens
cggatatactcctccctaggtggta

SEQ ID NO: 77041 - DNA, 25 bp, Homo sapiens
gtaagcattatattgatgatgatga

SEQ ID NO: 77042 - DNA, 25 bp, Homo sapiens
ccaggtgtcattcttgtgcaagttc

SEQ ID NO: 77043 - DNA, 25 bp, Homo sapiens
actgtgagtgctgagagagaaattc

SEQ ID NO: 77044 - DNA, 25 bp, Homo sapiens
gtcgacatatctgttggatgcaata

SEQ ID NO: 77045 - DNA, 25 bp, Homo sapiens
tagctcctgcctggtaactacaaag

SEQ ID NO: 77046 - DNA, 25 bp, Homo sapiens
tcccacaggcctggagacacagtta

SEQ ID NO: 77047 - DNA, 25 bp, Homo sapiens
tgctatcctgtgctctctgctcttc

SEQ ID NO: 77048 - DNA, 25 bp, Homo sapiens
cccagccatttatgtgtttctaaga

SEQ ID NO: 77049 - DNA, 25 bp, Homo sapiens
aggggcccatgatgctgaaactaca

SEQ ID NO: 77050 - DNA, 25 bp, Homo sapiens
ctctatagggaaacactggtgctgc

SEQ ID NO: 77051 - DNA, 25 bp, Homo sapiens
gttgcctgaaatggtactgacacgc

SEQ ID NO: 77052 - DNA, 25 bp, Homo sapiens
agtccattgtggctggcatatccca

SEQ ID NO: 77053 - DNA, 25 bp, Homo sapiens
agtgtattcttctttatagtgaaga

SEQ ID NO: 77054 - DNA, 25 bp, Homo sapiens
gagtggctcaactgctgtcatttta

SEQ ID NO: 77055 - DNA, 25 bp, Homo sapiens
cctgcctggtctcctgtaaaatgta

SEQ ID NO: 77056 - DNA, 25 bp, Homo sapiens
tttgattcagcagagagtagttttg

SEQ ID NO: 77057 - DNA, 25 bp, Homo sapiens
gtttatgaattgtttgatttaaacc

SEQ ID NO: 77058 - DNA, 25 bp, Homo sapiens
ggcaagctgtttctctggaagactc

SEQ ID NO: 77059 - DNA, 25 bp, Homo sapiens
tggcactgagaatttagaaacactg

SEQ ID NO: 77060 - DNA, 25 bp, Homo sapiens
ttaaaaattcatgttattatagtta

SEQ ID NO: 77061 - DNA, 25 bp, Homo sapiens
gaatcagcatagaggtaagagatca

SEQ ID NO: 77062 - DNA, 25 bp, Homo sapiens
gtcctttctgctacttcctttgcta

SEQ ID NO: 77063 - DNA, 25 bp, Homo sapiens
atgtgtttttatatcctggtacaga

SEQ ID NO: 77064 - DNA, 25 bp, Homo sapiens
agctatttaaatttcttttctaaaa

SEQ ID NO: 77065 - DNA, 25 bp, Homo sapiens
ctgctcttattacttctgggaaacc

SEQ ID NO: 77066 - DNA, 25 bp, Homo sapiens
ggtttggcctatttcatgtcacttg

SEQ ID NO: 77067 - DNA, 25 bp, Homo sapiens
agtcaccacctatctttaaaaaagg

SEQ ID NO: 77068 - DNA, 25 bp, Homo sapiens
ccagtctgttattcaaggacattta

SEQ ID NO: 77069 - DNA, 25 bp, Homo sapiens
tctgagctaactgaccctgcccaag

SEQ ID NO: 77070 - DNA, 25 bp, Homo sapiens
ccatggggccttatgtgatcacatc

SEQ ID NO: 77071 - DNA, 25 bp, Homo sapiens
ctgagttggataccatttcccatta

SEQ ID NO: 77072 - DNA, 25 bp, Homo sapiens
tgcaaaatgcctgtagagctgtccc

SEQ ID NO: 77073 - DNA, 25 bp, Homo sapiens
ctgtttgattctgcaaggcctttga

SEQ ID NO: 77074 - DNA, 25 bp, Homo sapiens
tggctgaggatctaaaagcaccata

SEQ ID NO: 77075 - DNA, 25 bp, Homo sapiens
ctgttgatgcagatacttacgtatt

SEQ ID NO: 77076 - DNA, 25 bp, Homo sapiens
ctttctgggctttgactcggctata

SEQ ID NO: 77077 - DNA, 25 bp, Homo sapiens
cctgccatagctggttgtgaatagc

SEQ ID NO: 77078 - DNA, 25 bp, Homo sapiens
gttggccagctctctcctgactcta

SEQ ID NO: 77079 - DNA, 25 bp, Homo sapiens
aaacctctgctttgctctctgtgga

SEQ ID NO: 77080 - DNA, 25 bp, Homo sapiens
agcttggcattgacatacacttgga

SEQ ID NO: 77081 - DNA, 25 bp, Homo sapiens
ctgggagctcccgttctctgattac

SEQ ID NO: 77082 - DNA, 25 bp, Homo sapiens
tgtgcctcggctttttcatatgctc

SEQ ID NO: 77083 - DNA, 25 bp, Homo sapiens
caagtttttttctcatgtatgaatg

SEQ ID NO: 77084 - DNA, 25 bp, Homo sapiens
cctatcgggtagctcctaatttgtc

SEQ ID NO: 77085 - DNA, 25 bp, Homo sapiens
tacctggtaagctgacaacaaattt

SEQ ID NO: 77086 - DNA, 25 bp, Homo sapiens
tctgtggagccatgacaatatcctc

SEQ ID NO: 77087 - DNA, 25 bp, Homo sapiens
gttactttcattttcagccaagatg

SEQ ID NO: 77088 - DNA, 25 bp, Homo sapiens
tcactaaaatatcagcttgtgctgc

SEQ ID NO: 77089 - DNA, 25 bp, Homo sapiens
caaaagtattgtctaggtaaaaatg

SEQ ID NO: 77090 - DNA, 25 bp, Homo sapiens
ggctttttctgctccaccctggttc

SEQ ID NO: 77091 - DNA, 25 bp, Homo sapiens
tgagatatccaacccactctgtgtg

SEQ ID NO: 77092 - DNA, 25 bp, Homo sapiens
ctcaggctgtgggtccatttcttaa

SEQ ID NO: 77093 - DNA, 25 bp, Homo sapiens
gctgccttgttttctcttactggga

SEQ ID NO: 77094 - DNA, 25 bp, Homo sapiens
gttcaaaattttataattctataca

SEQ ID NO: 77095 - DNA, 25 bp, Homo sapiens
tggctagcccttgcagaaaatattc

SEQ ID NO: 77096 - DNA, 25 bp, Homo sapiens
acgctttcctccatgtcttcacaga

SEQ ID NO: 77097 - DNA, 25 bp, Homo sapiens
gctgagctatttcctagagcctaaa

SEQ ID NO: 77098 - DNA, 25 bp, Homo sapiens
ctcactattcggtggggaaagcata

SEQ ID NO: 77099 - DNA, 25 bp, Homo sapiens
ggacatagtttcagacttccaacaa

SEQ ID NO: 77100 - DNA, 25 bp, Homo sapiens
attcacataaaatgaacataaactt

SEQ ID NO: 77101 - DNA, 25 bp, Homo sapiens
ctctactgtgggtttggcccttttc

SEQ ID NO: 77102 - DNA, 25 bp, Homo sapiens
accagtgctttgacttttgcagaca

SEQ ID NO: 77103 - DNA, 25 bp, Homo sapiens
tggggtcatggctctctagttttag

SEQ ID NO: 77104 - DNA, 25 bp, Homo sapiens
tagtggcacctttccctataattga

SEQ ID NO: 77105 - DNA, 25 bp, Homo sapiens
atggctcccatagtctgcgtgatta

SEQ ID NO: 77106 - DNA, 25 bp, Homo sapiens
tctcagttctggataaagtcttgtc

SEQ ID NO: 77107 - DNA, 25 bp, Homo sapiens
tctggccatgagcaattttttcgta

SEQ ID NO: 77108 - DNA, 25 bp, Homo sapiens
gatcacagttgcacctttacacctt

SEQ ID NO: 77109 - DNA, 25 bp, Homo sapiens
gctggtttcttctacaccttgtcca

SEQ ID NO: 77110 - DNA, 25 bp, Homo sapiens
gtcctcaggaaatgcgaacactatg

SEQ ID NO: 77111 - DNA, 25 bp, Homo sapiens
tgaatgcctgtgctaatattaggta

SEQ ID NO: 77112 - DNA, 25 bp, Homo sapiens
tgaggtcagtcacaggaatgcttga

SEQ ID NO: 77113 - DNA, 25 bp, Homo sapiens
cccaagtggttactcattaagactg

SEQ ID NO: 77114 - DNA, 25 bp, Homo sapiens
gaataaactttattctacaatataa

SEQ ID NO: 77115 - DNA, 25 bp, Homo sapiens
tttggcgccttcctcagttaacagg

SEQ ID NO: 77116 - DNA, 25 bp, Homo sapiens
ctagttgctcaaagtctggattttc

SEQ ID NO: 77117 - DNA, 25 bp, Homo sapiens
gtgacacctgcttttcctttcattg

SEQ ID NO: 77118 - DNA, 25 bp, Homo sapiens
agagcacttctcagctgtgtattta

SEQ ID NO: 77119 - DNA, 25 bp, Homo sapiens
ttgctccatgaataacccaaatgtg

SEQ ID NO: 77120 - DNA, 25 bp, Homo sapiens
cctccttagtgtgagagcctgattc

SEQ ID NO: 77121 - DNA, 25 bp, Homo sapiens
agcccttgggtcactacagagaaga

SEQ ID NO: 77122 - DNA, 25 bp, Homo sapiens
tgccaggtgtaggaagagttacttc

SEQ ID NO: 77123 - DNA, 25 bp, Homo sapiens
agggcctgttcggttgcttattgaa

SEQ ID NO: 77124 - DNA, 25 bp, Homo sapiens
tgtttgtgtatacagatgtgtgttc

SEQ ID NO: 77125 - DNA, 25 bp, Homo sapiens
gtatttaagatggttttatatttga

SEQ ID NO: 77126 - DNA, 25 bp, Homo sapiens
tctagccagggtttcatcacaatgc

SEQ ID NO: 77127 - DNA, 25 bp, Homo sapiens
gtttgggtcatctgctttgatatca

SEQ ID NO: 77128 - DNA, 25 bp, Homo sapiens
aagcctccaagtgtgcctccaaaga

SEQ ID NO: 77129 - DNA, 25 bp, Homo sapiens
gtcaaactccattaatacagtcatg

SEQ ID NO: 77130 - DNA, 25 bp, Homo sapiens
cctgggcaaagtttagtgattcttc

SEQ ID NO: 77131 - DNA, 25 bp, Homo sapiens
cacagtagtattgggcagttaatta

SEQ ID NO: 77132 - DNA, 25 bp, Homo sapiens
gccgctctcagctctatggaaactt

SEQ ID NO: 77133 - DNA, 25 bp, Homo sapiens
gtgctcaagtgctacctgcaaacta

SEQ ID NO: 77134 - DNA, 25 bp, Homo sapiens
gtggtacctgacttgcccaagaatc

SEQ ID NO: 77135 - DNA, 25 bp, Homo sapiens
cgtggctttaagagaggtacctgta

SEQ ID NO: 77136 - DNA, 25 bp, Homo sapiens
gggcccacatttcttttctcaggga

SEQ ID NO: 77137 - DNA, 25 bp, Homo sapiens
gccagacaagttccagttttgatta

SEQ ID NO: 77138 - DNA, 25 bp, Homo sapiens
tcagagggcccacagatttaattca

SEQ ID NO: 77139 - DNA, 25 bp, Homo sapiens
ttcagcctgctaaaaccatagggtg

SEQ ID NO: 77140 - DNA, 25 bp, Homo sapiens
tgggcaaacttctcactctcattcc

SEQ ID NO: 77141 - DNA, 25 bp, Homo sapiens
cagggtacagcctgccgaatatttc

SEQ ID NO: 77142 - DNA, 25 bp, Homo sapiens
aggggacctttgtctaacgtctgac

SEQ ID NO: 77143 - DNA, 25 bp, Homo sapiens
tgcgttgcccaagtctgagtttttc

SEQ ID NO: 77144 - DNA, 25 bp, Homo sapiens
cccacccagttgtcagagattctta

SEQ ID NO: 77145 - DNA, 25 bp, Homo sapiens
gtgtttgcttcatctctttctattg

SEQ ID NO: 77146 - DNA, 25 bp, Homo sapiens
gggcaaagaccctgtccttaatatt

SEQ ID NO: 77147 - DNA, 25 bp, Homo sapiens
gccgtgcaggcagatgataactatg

SEQ ID NO: 77148 - DNA, 25 bp, Homo sapiens
tttctgaagctgcacccatgttttc

SEQ ID NO: 77149 - DNA, 25 bp, Homo sapiens
acattagtttgtgatcagatgcacc

SEQ ID NO: 77150 - DNA, 25 bp, Homo sapiens
atataatatataaatgcacacacac

SEQ ID NO: 77151 - DNA, 25 bp, Homo sapiens
tccatctagagtttcacacagtacg

SEQ ID NO: 77152 - DNA, 25 bp, Homo sapiens
gtaaccttgaaacccactagcctgg

SEQ ID NO: 77153 - DNA, 25 bp, Homo sapiens
ggctgttatctcttactcaactgta

SEQ ID NO: 77154 - DNA, 25 bp, Homo sapiens
gcctctttcgtatatggcaactgaa

SEQ ID NO: 77155 - DNA, 25 bp, Homo sapiens
ggcaagccagctgggattattcaca

SEQ ID NO: 77156 - DNA, 25 bp, Homo sapiens
tgccctggcctttttcgatagttta

SEQ ID NO: 77157 - DNA, 25 bp, Homo sapiens
gttgagaccgcagccacagagtttc

SEQ ID NO: 77158 - DNA, 25 bp, Homo sapiens
cgcaggcctggatgcaatctcagtt

SEQ ID NO: 77159 - DNA, 25 bp, Homo sapiens
aagatggttcttagggatttttcta

SEQ ID NO: 77160 - DNA, 25 bp, Homo sapiens
gagcttctgttgctatttctctgaa

SEQ ID NO: 77161 - DNA, 25 bp, Homo sapiens
tgttgggttccagagttagcttttc

SEQ ID NO: 77162 - DNA, 25 bp, Homo sapiens
caaagtagccaccagtcagtaagtc

SEQ ID NO: 77163 - DNA, 25 bp, Homo sapiens
tctctgaggataagtagtgtgtttc

SEQ ID NO: 77164 - DNA, 25 bp, Homo sapiens
ggctctgtctcattggtagttaacc

SEQ ID NO: 77165 - DNA, 25 bp, Homo sapiens
tgaatgtcatctctgtccctctgga

SEQ ID NO: 77166 - DNA, 25 bp, Homo sapiens
tgcccttcgtgcactgaaaacactg

SEQ ID NO: 77167 - DNA, 25 bp, Homo sapiens
ggcttgatcttcttcgcttcttgtc

SEQ ID NO: 77168 - DNA, 25 bp, Homo sapiens
ggcagggtgtcatatctccagattt

SEQ ID NO: 77169 - DNA, 25 bp, Homo sapiens
cccaaaatgtgtgttatcaggatca

SEQ ID NO: 77170 - DNA, 25 bp, Homo sapiens
ctctagtaaggacatttgtgttatg

SEQ ID NO: 77171 - DNA, 25 bp, Homo sapiens
tcttatactgttggatatttgttta

SEQ ID NO: 77172 - DNA, 25 bp, Homo sapiens
tatccttttttgttccaacttgtct

SEQ ID NO: 77173 - DNA, 25 bp, Homo sapiens
ggccagccagaacaacagatggtta

SEQ ID NO: 77174 - DNA, 25 bp, Homo sapiens
cagggttgacccacgtggtacttca

SEQ ID NO: 77175 - DNA, 25 bp, Homo sapiens
tgtcagcattcacccagagcagatt

SEQ ID NO: 77176 - DNA, 25 bp, Homo sapiens
tggttatctcctgctacctcaagta

SEQ ID NO: 77177 - DNA, 25 bp, Homo sapiens
ttttaaaaagaggtggaaacatagg

SEQ ID NO: 77178 - DNA, 25 bp, Homo sapiens
taacatatctcacatttttgaatta

SEQ ID NO: 77179 - DNA, 25 bp, Homo sapiens
cttgctagcgccgtaatcttaggta

SEQ ID NO: 77180 - DNA, 25 bp, Homo sapiens
ctatgctgagttttgggctatcttc

SEQ ID NO: 77181 - DNA, 25 bp, Homo sapiens
atcccgggtttgctagccttattta

SEQ ID NO: 77182 - DNA, 25 bp, Homo sapiens
tccacgcagggttaggcaacttata

SEQ ID NO: 77183 - DNA, 25 bp, Homo sapiens
cctaagcactttgagaggttacaga

SEQ ID NO: 77184 - DNA, 25 bp, Homo sapiens
gtgagcctgtacctaatccgttcta

SEQ ID NO: 77185 - DNA, 25 bp, Homo sapiens
tcagagtgtttttcacaggtggttc

SEQ ID NO: 77186 - DNA, 25 bp, Homo sapiens
cagactgaagtgtgtccctggtaca

SEQ ID NO: 77187 - DNA, 25 bp, Homo sapiens
aaggctttttcagaagtcaacatga

SEQ ID NO: 77188 - DNA, 25 bp, Homo sapiens
agaggtcactgaatcacactttgca

SEQ ID NO: 77189 - DNA, 25 bp, Homo sapiens
gcactgtggtgcctggtttatatca

SEQ ID NO: 77190 - DNA, 25 bp, Homo sapiens
gtatctgtcttgttcactgagcttc

SEQ ID NO: 77191 - DNA, 25 bp, Homo sapiens
aggctactgcatagatgatactgta

SEQ ID NO: 77192 - DNA, 25 bp, Homo sapiens
tgggtccagtctcttaattaaattc

SEQ ID NO: 77193 - DNA, 25 bp, Homo sapiens
tcttacaggcatcttgagagacata

SEQ ID NO: 77194 - DNA, 25 bp, Homo sapiens
ttagacaggcaagcaggcaaaaatt

SEQ ID NO: 77195 - DNA, 25 bp, Homo sapiens
gatcatcgatcatatcaaaattaga

SEQ ID NO: 77196 - DNA, 25 bp, Homo sapiens
gtagccttaaaaaatttacaacaaa

SEQ ID NO: 77197 - DNA, 25 bp, Homo sapiens
agttaatattttcccaacggtcaga

SEQ ID NO: 77198 - DNA, 25 bp, Homo sapiens
tggcaaggccttaagtgagtttatc

SEQ ID NO: 77199 - DNA, 25 bp, Homo sapiens
actggccctagtgctaatttacaga

SEQ ID NO: 77200 - DNA, 25 bp, Homo sapiens
ctagttggatgcttggcaaagtttc

SEQ ID NO: 77201 - DNA, 25 bp, Homo sapiens
tcattagggattgtttctgcacata

SEQ ID NO: 77202 - DNA, 25 bp, Homo sapiens
ctgcgccctctgctgttaacatatg

SEQ ID NO: 77203 - DNA, 25 bp, Homo sapiens
tgagagtctctcatcctcaagatgc

SEQ ID NO: 77204 - DNA, 25 bp, Homo sapiens
gggagctgcttctgcctatctttca

SEQ ID NO: 77205 - DNA, 25 bp, Homo sapiens
aggacgtgtcgccattgtgcatgca

SEQ ID NO: 77206 - DNA, 25 bp, Homo sapiens
ctgctattactcagctgatggtgtc

SEQ ID NO: 77207 - DNA, 25 bp, Homo sapiens
ggattctgctggctctctgatttta

SEQ ID NO: 77208 - DNA, 25 bp, Homo sapiens
ctggaattttttctggttagacttc

SEQ ID NO: 77209 - DNA, 25 bp, Homo sapiens
cagtatgtggccaaacgttaatttc

SEQ ID NO: 77210 - DNA, 25 bp, Homo sapiens
tcccttctcggttgtctgctctaaa

SEQ ID NO: 77211 - DNA, 25 bp, Homo sapiens
ctggccagtttttgggctacaatac

SEQ ID NO: 77212 - DNA, 25 bp, Homo sapiens
tccaacagagtaaaacgtttgcttc

SEQ ID NO: 77213 - DNA, 25 bp, Homo sapiens
tatggtcagtaaacacaagtcagta

SEQ ID NO: 77214 - DNA, 25 bp, Homo sapiens
cagtgcttctctcttttgcctaata

SEQ ID NO: 77215 - DNA, 25 bp, Homo sapiens
gccctcaggaagcacactcacaagt

SEQ ID NO: 77216 - DNA, 25 bp, Homo sapiens
caatggttcttttcctgcctcaggg

SEQ ID NO: 77217 - DNA, 25 bp, Homo sapiens
atatgctctgctcccctcatcacac

SEQ ID NO: 77218 - DNA, 25 bp, Homo sapiens
gcctgctagctagaaggcagcttta

SEQ ID NO: 77219 - DNA, 25 bp, Homo sapiens
ttgtggaagcagagagtacatcatc

SEQ ID NO: 77220 - DNA, 25 bp, Homo sapiens
ctgcagggcaattcctagaagtttc

SEQ ID NO: 77221 - DNA, 25 bp, Homo sapiens
cctcagggtccttttactatatagc

SEQ ID NO: 77222 - DNA, 25 bp, Homo sapiens
taagctagtaaatgttttatctttt

SEQ ID NO: 77223 - DNA, 25 bp, Homo sapiens
gatgctttctctttgcctctaaata

SEQ ID NO: 77224 - DNA, 25 bp, Homo sapiens
tttggctatatattttaagcgatta

SEQ ID NO: 77225 - DNA, 25 bp, Homo sapiens
cctggggtagacttatcatgtgtcc

SEQ ID NO: 77226 - DNA, 25 bp, Homo sapiens
ccacaggcagcttttcttggaaatc

SEQ ID NO: 77227 - DNA, 25 bp, Homo sapiens
ggtgagagagctgcaacttgcttta

SEQ ID NO: 77228 - DNA, 25 bp, Homo sapiens
cacagtgtgcagatatggactccta

SEQ ID NO: 77229 - DNA, 25 bp, Homo sapiens
ttccggccaacattgtaaacatacg

SEQ ID NO: 77230 - DNA, 25 bp, Homo sapiens
ttgccaaattttagcttgtaagctc

SEQ ID NO: 77231 - DNA, 25 bp, Homo sapiens
cgttacctgtttgctttactgagtt

SEQ ID NO: 77232 - DNA, 25 bp, Homo sapiens
tccctggggaggcatttacatttct

SEQ ID NO: 77233 - DNA, 25 bp, Homo sapiens
gcagcactgtgcatgtaataggatc

SEQ ID NO: 77234 - DNA, 25 bp, Homo sapiens
acgatctaatttttggcccatctga

SEQ ID NO: 77235 - DNA, 25 bp, Homo sapiens
gctttgtagcatctcacggtctcca

SEQ ID NO: 77236 - DNA, 25 bp, Homo sapiens
agccttggacaacaaaccttcattg

SEQ ID NO: 77237 - DNA, 25 bp, Homo sapiens
tcagaaagagagatgtggagttacc

SEQ ID NO: 77238 - DNA, 25 bp, Homo sapiens
gtttactctctcagtccaccagatg

SEQ ID NO: 77239 - DNA, 25 bp, Homo sapiens
ccctggggaggcaataagaacaatt

SEQ ID NO: 77240 - DNA, 25 bp, Homo sapiens
ttttgcccagtaaatgtcctatgga

SEQ ID NO: 77241 - DNA, 25 bp, Homo sapiens
gatgcttaatctctcttctgtagta

SEQ ID NO: 77242 - DNA, 25 bp, Homo sapiens
tgccttctcggcacacttaaaaagt

SEQ ID NO: 77243 - DNA, 25 bp, Homo sapiens
ttgtgacttacctcctagtggaagg

SEQ ID NO: 77244 - DNA, 25 bp, Homo sapiens
tgtgttagcacgacaacttgttttg

SEQ ID NO: 77245 - DNA, 25 bp, Homo sapiens
gcagcaagtttatgaggaccgaata

SEQ ID NO: 77246 - DNA, 25 bp, Homo sapiens
agtcgtgtcaccctctttttaagta

SEQ ID NO: 77247 - DNA, 25 bp, Homo sapiens
tctttccggctgtgctgagctatca

SEQ ID NO: 77248 - DNA, 25 bp, Homo sapiens
taagggacttctgctctactaagtg

SEQ ID NO: 77249 - DNA, 25 bp, Homo sapiens
catccagtatgaatagatatcaact

SEQ ID NO: 77250 - DNA, 25 bp, Homo sapiens
acgtccctgagtggccatgatattc

SEQ ID NO: 77251 - DNA, 25 bp, Homo sapiens
ttttccatcaggatttttcctactt

SEQ ID NO: 77252 - DNA, 25 bp, Homo sapiens
atccactggggttcatactttatca

SEQ ID NO: 77253 - DNA, 25 bp, Homo sapiens
acccttcacctcacatatatgagac

SEQ ID NO: 77254 - DNA, 25 bp, Homo sapiens
ggcaggctccaaaacatggctgata

SEQ ID NO: 77255 - DNA, 25 bp, Homo sapiens
gtgtctacatttttctctcagggta

SEQ ID NO: 77256 - DNA, 25 bp, Homo sapiens
ttccgagtgtttttcctagcaagta

SEQ ID NO: 77257 - DNA, 25 bp, Homo sapiens
ctcccatatagtcaaaaattccagg

SEQ ID NO: 77258 - DNA, 25 bp, Homo sapiens
ttctgatatctttctcttcttagtt

SEQ ID NO: 77259 - DNA, 25 bp, Homo sapiens
cctgacattctctgactctccgata

SEQ ID NO: 77260 - DNA, 25 bp, Homo sapiens
gttgatgatgagtccctccttcttg

SEQ ID NO: 77261 - DNA, 25 bp, Homo sapiens
cccatacgtctctggctggttcata

SEQ ID NO: 77262 - DNA, 25 bp, Homo sapiens
gagtccatttctggtctgaatcaag

SEQ ID NO: 77263 - DNA, 25 bp, Homo sapiens
gttgaaatagtttataaccttttat

SEQ ID NO: 77264 - DNA, 25 bp, Homo sapiens
gtccagccagagactgtgtcatttt

SEQ ID NO: 77265 - DNA, 25 bp, Homo sapiens
aggcccaggtgtcgaaacatattta

SEQ ID NO: 77266 - DNA, 25 bp, Homo sapiens
ggtagacctaagttcctcaaaaatg

SEQ ID NO: 77267 - DNA, 25 bp, Homo sapiens
tttgcgtagcacttagggattttcc

SEQ ID NO: 77268 - DNA, 25 bp, Homo sapiens
tggtcacacattgtcacaggttttg

SEQ ID NO: 77269 - DNA, 25 bp, Homo sapiens
caatcatgttcctggttcaatcgtg

SEQ ID NO: 77270 - DNA, 25 bp, Homo sapiens
cttcaggtgggagaaaactgtcttc

SEQ ID NO: 77271 - DNA, 25 bp, Homo sapiens
ggcaacccgtacacttgctttcatg

SEQ ID NO: 77272 - DNA, 25 bp, Homo sapiens
ttcattcttttgtggaacagaccca

SEQ ID NO: 77273 - DNA, 25 bp, Homo sapiens
tttggtcatccataggctgcccttg

SEQ ID NO: 77274 - DNA, 25 bp, Homo sapiens
agtgttgccaacctagtaattcaga

SEQ ID NO: 77275 - DNA, 25 bp, Homo sapiens
gccaccagtttgtttgttcctgaaa

SEQ ID NO: 77276 - DNA, 25 bp, Homo sapiens
tgttccttgaatagcatcgtcctga

SEQ ID NO: 77277 - DNA, 25 bp, Homo sapiens
ctgctctcttacttgggcatagata

SEQ ID NO: 77278 - DNA, 25 bp, Homo sapiens
tgctggatccaatctggactgagtc

SEQ ID NO: 77279 - DNA, 25 bp, Homo sapiens
actagatgttgagagagcccttacc

SEQ ID NO: 77280 - DNA, 25 bp, Homo sapiens
ctaaattgtttgaagccactgcctc

SEQ ID NO: 77281 - DNA, 25 bp, Homo sapiens
ggatggctgctgcaatgtcttcaga

SEQ ID NO: 77282 - DNA, 25 bp, Homo sapiens
tcacatccaggtctcgcttcgttta

SEQ ID NO: 77283 - DNA, 25 bp, Homo sapiens
tgtcccttctgccatgcaatctttg

SEQ ID NO: 77284 - DNA, 25 bp, Homo sapiens
gtaggcatattgctttaccacatga

SEQ ID NO: 77285 - DNA, 25 bp, Homo sapiens
tgggctaggaccaagatattcgatc

SEQ ID NO: 77286 - DNA, 25 bp, Homo sapiens
ggggcccttgcttcttcacttcaaa

SEQ ID NO: 77287 - DNA, 25 bp, Homo sapiens
agtgtttaccctgatccattaaagg

SEQ ID NO: 77288 - DNA, 25 bp, Homo sapiens
ctaagcacgtccacctgtgaagatg

SEQ ID NO: 77289 - DNA, 25 bp, Homo sapiens
ggatacgtttctgcaccacatttta

SEQ ID NO: 77290 - DNA, 25 bp, Homo sapiens
gggcctttaaggctgtcccaaactt

SEQ ID NO: 77291 - DNA, 25 bp, Homo sapiens
tcctgtgtcaaaagaggtatggatt

SEQ ID NO: 77292 - DNA, 25 bp, Homo sapiens
agccgtgccaagttcccattagatg

SEQ ID NO: 77293 - DNA, 25 bp, Homo sapiens
tggatcctagatgaattgacctctc

SEQ ID NO: 77294 - DNA, 25 bp, Homo sapiens
gtcacccaggttccatgagaaatta

SEQ ID NO: 77295 - DNA, 25 bp, Homo sapiens
tggcgatacgccatggtcaaattta

SEQ ID NO: 77296 - DNA, 25 bp, Homo sapiens
gccctggtctgggttagctactata

SEQ ID NO: 77297 - DNA, 25 bp, Homo sapiens
gtgaagatcatccaacaaatgaatg

SEQ ID NO: 77298 - DNA, 25 bp, Homo sapiens
gccctaaggagccactgatgaactt

SEQ ID NO: 77299 - DNA, 25 bp, Homo sapiens
tagcgattctgttacctaaaacatg

SEQ ID NO: 77300 - DNA, 25 bp, Homo sapiens
aataatttatatttccaactttgtc

SEQ ID NO: 77301 - DNA, 25 bp, Homo sapiens
gctttttaaaactgactgctgatca

SEQ ID NO: 77302 - DNA, 25 bp, Homo sapiens
tgaaagacgttttcgtaggtactca

SEQ ID NO: 77303 - DNA, 25 bp, Homo sapiens
tgcaacactttagaagccagcctta

SEQ ID NO: 77304 - DNA, 25 bp, Homo sapiens
atataaagaaaagtgtgattgcttc

SEQ ID NO: 77305 - DNA, 25 bp, Homo sapiens
gctgtgctcatctccacaggggata

SEQ ID NO: 77306 - DNA, 25 bp, Homo sapiens
tggggcaagcttctcacactgttta

SEQ ID NO: 77307 - DNA, 25 bp, Homo sapiens
agctcctcttgataggccatatttc

SEQ ID NO: 77308 - DNA, 25 bp, Homo sapiens
agcagcccaggatctttttctgtca

SEQ ID NO: 77309 - DNA, 25 bp, Homo sapiens
acaattcctttggttgcccatgtga

SEQ ID NO: 77310 - DNA, 25 bp, Homo sapiens
atgaaactggtttttgcctccacac

SEQ ID NO: 77311 - DNA, 25 bp, Homo sapiens
gtctgttctagacaggaatcccttg

SEQ ID NO: 77312 - DNA, 25 bp, Homo sapiens
gagttcacctcataacactgttaga

SEQ ID NO: 77313 - DNA, 25 bp, Homo sapiens
gagtgttcttccctttgcataatgc

SEQ ID NO: 77314 - DNA, 25 bp, Homo sapiens
ggtgccctgtgaaaatggtgctcta

SEQ ID NO: 77315 - DNA, 25 bp, Homo sapiens
tgcgtcttgagacacactgtggacc

SEQ ID NO: 77316 - DNA, 25 bp, Homo sapiens
ctaaatcatgggactatcaggagga

SEQ ID NO: 77317 - DNA, 25 bp, Homo sapiens
agcctcccaagcagaaataaaagtg

SEQ ID NO: 77318 - DNA, 25 bp, Homo sapiens
caaggtgttgtcctcatgaattcca

SEQ ID NO: 77319 - DNA, 25 bp, Homo sapiens
ggatgccttcctgtgctattgcaaa

SEQ ID NO: 77320 - DNA, 25 bp, Homo sapiens
ctggtctagagtacagccactgcta

SEQ ID NO: 77321 - DNA, 25 bp, Homo sapiens
tgccctaagccctgagctcacattg

SEQ ID NO: 77322 - DNA, 25 bp, Homo sapiens
caagtgttgccctgtccagttaatg

SEQ ID NO: 77323 - DNA, 25 bp, Homo sapiens
ttcttaggccctcatagtcttagtg

SEQ ID NO: 77324 - DNA, 25 bp, Homo sapiens
atggcgggtgtgctcaatttaaatc

SEQ ID NO: 77325 - DNA, 25 bp, Homo sapiens
tcatgccggcttgtgtttccaaagg

SEQ ID NO: 77326 - DNA, 25 bp, Homo sapiens
ggcatgaaccttactccttttctga

SEQ ID NO: 77327 - DNA, 25 bp, Homo sapiens
tggccaagggctccaagcataattg

SEQ ID NO: 77328 - DNA, 25 bp, Homo sapiens
gccggctactctgctctcctaaaat

SEQ ID NO: 77329 - DNA, 25 bp, Homo sapiens
tacacctttgtatcagtctggccaa

SEQ ID NO: 77330 - DNA, 25 bp, Homo sapiens
cagccgtcttgtgttctttcagtca

SEQ ID NO: 77331 - DNA, 25 bp, Homo sapiens
ttccctaactgctgagacctacgtg

SEQ ID NO: 77332 - DNA, 25 bp, Homo sapiens
atactatgttttacaacaatttcct

SEQ ID NO: 77333 - DNA, 25 bp, Homo sapiens
cctaccagttgaggctctaggaatc

SEQ ID NO: 77334 - DNA, 25 bp, Homo sapiens
tgccagactatgagagtgatgccta

SEQ ID NO: 77335 - DNA, 25 bp, Homo sapiens
tccacctggagaggacatcaaaaca

SEQ ID NO: 77336 - DNA, 25 bp, Homo sapiens
aagccatgtcccttcttcagagaaa

SEQ ID NO: 77337 - DNA, 25 bp, Homo sapiens
ctgactgcctgaacctctgtgttta

SEQ ID NO: 77338 - DNA, 25 bp, Homo sapiens
attcctggccgagaaggtagtctca

SEQ ID NO: 77339 - DNA, 25 bp, Homo sapiens
gtgaggctcttaccaactccaagga

SEQ ID NO: 77340 - DNA, 25 bp, Homo sapiens
ccagcgccagcccttgaaggtatta

SEQ ID NO: 77341 - DNA, 25 bp, Homo sapiens
tggcagccctactcaccagatcttg

SEQ ID NO: 77342 - DNA, 25 bp, Homo sapiens
gttctttgttccagtcagtgcacca

SEQ ID NO: 77343 - DNA, 25 bp, Homo sapiens
gctgttcctgtggttgcaaagaata

SEQ ID NO: 77344 - DNA, 25 bp, Homo sapiens
tgatgtacatcagcagagttccttt

SEQ ID NO: 77345 - DNA, 25 bp, Homo sapiens
tctcaggaagccaacactgtgttca

SEQ ID NO: 77346 - DNA, 25 bp, Homo sapiens
gaccctttagatgcggattacttga

SEQ ID NO: 77347 - DNA, 25 bp, Homo sapiens
gggtatttctccatcgcagccttca

SEQ ID NO: 77348 - DNA, 25 bp, Homo sapiens
cacctctgtgcgtgtaatctcagga

SEQ ID NO: 77349 - DNA, 25 bp, Homo sapiens
gctgggtgcttcaaggtctaaaatc

SEQ ID NO: 77350 - DNA, 25 bp, Homo sapiens
tcgtgcactgagtacacattaattg

SEQ ID NO: 77351 - DNA, 25 bp, Homo sapiens
ataggcccttctctttcactactga

SEQ ID NO: 77352 - DNA, 25 bp, Homo sapiens
cagggccagcatccaaaagtatagc

SEQ ID NO: 77353 - DNA, 25 bp, Homo sapiens
ttagagtcagaaggtgtaaattcac

SEQ ID NO: 77354 - DNA, 25 bp, Homo sapiens
tatttatcctcataccttatagtca

SEQ ID NO: 77355 - DNA, 25 bp, Homo sapiens
gccatgtatgctttaatgaaagtta

SEQ ID NO: 77356 - DNA, 25 bp, Homo sapiens
ctgccaatctctgtggaagtcattt

SEQ ID NO: 77357 - DNA, 25 bp, Homo sapiens
agttctcgatgcagaggctcctaca

SEQ ID NO: 77358 - DNA, 25 bp, Homo sapiens
caaggcagagtttagcaatgtcacc

SEQ ID NO: 77359 - DNA, 25 bp, Homo sapiens
gactgatctgctctgtgtaaatcta

SEQ ID NO: 77360 - DNA, 25 bp, Homo sapiens
atctgggacgacaacaaccttctta

SEQ ID NO: 77361 - DNA, 25 bp, Homo sapiens
ggggtctccacagtctacatctttg

SEQ ID NO: 77362 - DNA, 25 bp, Homo sapiens
taggtcttccacacactgagcaatg

SEQ ID NO: 77363 - DNA, 25 bp, Homo sapiens
ggctgtactatactactctttgcta

SEQ ID NO: 77364 - DNA, 25 bp, Homo sapiens
tgacgcctgaagcaaccatttaaag

SEQ ID NO: 77365 - DNA, 25 bp, Homo sapiens
ctggcattggctcatcccttttgga

SEQ ID NO: 77366 - DNA, 25 bp, Homo sapiens
gtgtcttactcccttccaagccata

SEQ ID NO: 77367 - DNA, 25 bp, Homo sapiens
acgtgttggcgctttccacctaaaa

SEQ ID NO: 77368 - DNA, 25 bp, Homo sapiens
cctgagtagaactagaccacagata

SEQ ID NO: 77369 - DNA, 25 bp, Homo sapiens
ggtcctgaggcttactgatatattc

SEQ ID NO: 77370 - DNA, 25 bp, Homo sapiens
tgcagaggattattccaatcaaacc

SEQ ID NO: 77371 - DNA, 25 bp, Homo sapiens
agagatccggattgtactgcttata

SEQ ID NO: 77372 - DNA, 25 bp, Homo sapiens
gtctggtgcacacaatttatgcttc

SEQ ID NO: 77373 - DNA, 25 bp, Homo sapiens
ttcttactacgaggggcttaccatc

SEQ ID NO: 77374 - DNA, 25 bp, Homo sapiens
gtagtctctaaagcaaatgcccttt

SEQ ID NO: 77375 - DNA, 25 bp, Homo sapiens
ggatcactgtgtagaagatctattc

SEQ ID NO: 77376 - DNA, 25 bp, Homo sapiens
ggatgctacaaattgtaggtgttat

SEQ ID NO: 77377 - DNA, 25 bp, Homo sapiens
gcagcttctgcttcctctcctatta

SEQ ID NO: 77378 - DNA, 25 bp, Homo sapiens
gctgctgtcaagaaaaccacgtatg

SEQ ID NO: 77379 - DNA, 25 bp, Homo sapiens
tttgtaagacaccatcccgtatttc

SEQ ID NO: 77380 - DNA, 25 bp, Homo sapiens
gttgactgcagcaagggccatcctt

SEQ ID NO: 77381 - DNA, 25 bp, Homo sapiens
gcagctggcaggcattgattctatt

SEQ ID NO: 77382 - DNA, 25 bp, Homo sapiens
tggccatttctaccctaagtctctg

SEQ ID NO: 77383 - DNA, 25 bp, Homo sapiens
caccaactttggagcactatcaatc

SEQ ID NO: 77384 - DNA, 25 bp, Homo sapiens
tgctgcccttcagtaagagaaaata

SEQ ID NO: 77385 - DNA, 25 bp, Homo sapiens
tattgttaagttttaagagtatgtg

SEQ ID NO: 77386 - DNA, 25 bp, Homo sapiens
tgggccagacttacagcagcaatgc

SEQ ID NO: 77387 - DNA, 25 bp, Homo sapiens
cctcagggttttgtttccgacagtg

SEQ ID NO: 77388 - DNA, 25 bp, Homo sapiens
atcctggtgctaactggggtactta

SEQ ID NO: 77389 - DNA, 25 bp, Homo sapiens
ggcccgttctctatgtggatactta

SEQ ID NO: 77390 - DNA, 25 bp, Homo sapiens
ggtgttcatactctccctcaaggtc

SEQ ID NO: 77391 - DNA, 25 bp, Homo sapiens
cagctgcaatgcaccaatggttttc

SEQ ID NO: 77392 - DNA, 25 bp, Homo sapiens
cacctccggaaggtatcaggattta

SEQ ID NO: 77393 - DNA, 25 bp, Homo sapiens
cttgctccaacttccttttcactga

SEQ ID NO: 77394 - DNA, 25 bp, Homo sapiens
aggtccactgtgcaactccattttc

SEQ ID NO: 77395 - DNA, 25 bp, Homo sapiens
cctccaggtctgcaagatttttgtt

SEQ ID NO: 77396 - DNA, 25 bp, Homo sapiens
tgggctgtcactcagtcaatctgtg

SEQ ID NO: 77397 - DNA, 25 bp, Homo sapiens
cagcgtggggtttgcaattcctttt

SEQ ID NO: 77398 - DNA, 25 bp, Homo sapiens
gaggcagcccaattcttatagtgtc

SEQ ID NO: 77399 - DNA, 25 bp, Homo sapiens
atcctcgtcatggttctattgtgca

SEQ ID NO: 77400 - DNA, 25 bp, Homo sapiens
gctgggtcagctctttcaattaata

SEQ ID NO: 77401 - DNA, 25 bp, Homo sapiens
tgatgagcctagtctgaaatctgtg

SEQ ID NO: 77402 - DNA, 25 bp, Homo sapiens
tctgggacggtgaaagaagcacttc

SEQ ID NO: 77403 - DNA, 25 bp, Homo sapiens
ggcttgctttatggcagacatccaa

SEQ ID NO: 77404 - DNA, 25 bp, Homo sapiens
tgggagagggtgtctttcacaactc

SEQ ID NO: 77405 - DNA, 25 bp, Homo sapiens
tacccaaatgggattacacactgtg

SEQ ID NO: 77406 - DNA, 25 bp, Homo sapiens
cctccttgtttttggcaggtacagg

SEQ ID NO: 77407 - DNA, 25 bp, Homo sapiens
tcctcagttcaaaagacagtgcctg

SEQ ID NO: 77408 - DNA, 25 bp, Homo sapiens
agccaattccctaggaggatcctga

SEQ ID NO: 77409 - DNA, 25 bp, Homo sapiens
ctgtgccacaccttgctttgcttta

SEQ ID NO: 77410 - DNA, 25 bp, Homo sapiens
caaccaatgcagcactgtgtcgtca

SEQ ID NO: 77411 - DNA, 25 bp, Homo sapiens
accatcagcaggtgggaacttgaca

SEQ ID NO: 77412 - DNA, 25 bp, Homo sapiens
caggcagcactttgggtgacaagtc

SEQ ID NO: 77413 - DNA, 25 bp, Homo sapiens
ggactctactgtgcaaatattttta

SEQ ID NO: 77414 - DNA, 25 bp, Homo sapiens
ggcttccttactttatcctgcattg

SEQ ID NO: 77415 - DNA, 25 bp, Homo sapiens
caaccttggctggaccttcaaagtc

SEQ ID NO: 77416 - DNA, 25 bp, Homo sapiens
ctgtctggccctaggaaatattctc

SEQ ID NO: 77417 - DNA, 25 bp, Homo sapiens
gcccaactggtttgtttgctacact

SEQ ID NO: 77418 - DNA, 25 bp, Homo sapiens
ttatccatagttatgtccacatcta

SEQ ID NO: 77419 - DNA, 25 bp, Homo sapiens
agctagcatagacaactctttgttg

SEQ ID NO: 77420 - DNA, 25 bp, Homo sapiens
tatagaggagagtctggtgagtccc

SEQ ID NO: 77421 - DNA, 25 bp, Homo sapiens
tgaagcaattagcaaacaaacaaaa

SEQ ID NO: 77422 - DNA, 25 bp, Homo sapiens
cacttctctgaacagctggcttgtc

SEQ ID NO: 77423 - DNA, 25 bp, Homo sapiens
cctttgcatgcttgatcctgtggga

SEQ ID NO: 77424 - DNA, 25 bp, Homo sapiens
ccagtgccagccaattgtagtttta

SEQ ID NO: 77425 - DNA, 25 bp, Homo sapiens
gcgtttttcactagacccattcatg

SEQ ID NO: 77426 - DNA, 25 bp, Homo sapiens
ccttccattgaggggatgtgaaaaa

SEQ ID NO: 77427 - DNA, 25 bp, Homo sapiens
ccctggccttaaggagcttcccata

SEQ ID NO: 77428 - DNA, 25 bp, Homo sapiens
ttcaagctgctctacctgtcatagc

SEQ ID NO: 77429 - DNA, 25 bp, Homo sapiens
tacctcttctgagcctatggaacca

SEQ ID NO: 77430 - DNA, 25 bp, Homo sapiens
acaggcagggtacttctcagagcta

SEQ ID NO: 77431 - DNA, 25 bp, Homo sapiens
tcctactgaaggagaggacaattca

SEQ ID NO: 77432 - DNA, 25 bp, Homo sapiens
ggtccagagacacttcactccctta

SEQ ID NO: 77433 - DNA, 25 bp, Homo sapiens
ctccttggctgtaaatgagccttca

SEQ ID NO: 77434 - DNA, 25 bp, Homo sapiens
ccgattattgtttgtccagggctga

SEQ ID NO: 77435 - DNA, 25 bp, Homo sapiens
gcaggctgttttctcttggtacttg

SEQ ID NO: 77436 - DNA, 25 bp, Homo sapiens
ggtgccacatcagggaaacactgta

SEQ ID NO: 77437 - DNA, 25 bp, Homo sapiens
ggcctgctgttctgccctactgaaa

SEQ ID NO: 77438 - DNA, 25 bp, Homo sapiens
ggcccttgtgcgttttattcttgta

SEQ ID NO: 77439 - DNA, 25 bp, Homo sapiens
tgtggcccagaagcccagaatttca

SEQ ID NO: 77440 - DNA, 25 bp, Homo sapiens
actccttaactgatgtgcctgtttg

SEQ ID NO: 77441 - DNA, 25 bp, Homo sapiens
tgttatgcagttttatcttcagtga

SEQ ID NO: 77442 - DNA, 25 bp, Homo sapiens
attaaggactgttttgtgctcacca

SEQ ID NO: 77443 - DNA, 25 bp, Homo sapiens
ggaggacagtagttcatttttagta

SEQ ID NO: 77444 - DNA, 25 bp, Homo sapiens
ggatctatcatcttaccagggcgca

SEQ ID NO: 77445 - DNA, 25 bp, Homo sapiens
tgcagtatctgtaagacacaacctc

SEQ ID NO: 77446 - DNA, 25 bp, Homo sapiens
agagacgtgcacctgctcatattca

SEQ ID NO: 77447 - DNA, 25 bp, Homo sapiens
gttcgctctctagaagttgtcacta

SEQ ID NO: 77448 - DNA, 25 bp, Homo sapiens
aacttgacaagaaaaggtaatctgg

SEQ ID NO: 77449 - DNA, 25 bp, Homo sapiens
gctgctggtggtctttaatgctttc

SEQ ID NO: 77450 - DNA, 25 bp, Homo sapiens
ttggctacaacttacatggtacttg

SEQ ID NO: 77451 - DNA, 25 bp, Homo sapiens
tgcggagctaccatggagttaatta

SEQ ID NO: 77452 - DNA, 25 bp, Homo sapiens
ttgggccttacttagccagtatgta

SEQ ID NO: 77453 - DNA, 25 bp, Homo sapiens
tgcagcaagcttttctccaatcgtt

SEQ ID NO: 77454 - DNA, 25 bp, Homo sapiens
ctcagtgtcattcagccagaagttc

SEQ ID NO: 77455 - DNA, 25 bp, Homo sapiens
gccagtactggcaatcctgactttg

SEQ ID NO: 77456 - DNA, 25 bp, Homo sapiens
cggggatcttttctacctctaaatg

SEQ ID NO: 77457 - DNA, 25 bp, Homo sapiens
atggtctctgacttttgccttctaa

SEQ ID NO: 77458 - DNA, 25 bp, Homo sapiens
aagctctcccagatgtagtacaata

SEQ ID NO: 77459 - DNA, 25 bp, Homo sapiens
tttggtcatacctgctccctctggg

SEQ ID NO: 77460 - DNA, 25 bp, Homo sapiens
tgctttggggtagaatgataacttc

SEQ ID NO: 77461 - DNA, 25 bp, Homo sapiens
gactgcgcaccattggagacaccta

SEQ ID NO: 77462 - DNA, 25 bp, Homo sapiens
gcacagtgctgtgaacaatcctctg

SEQ ID NO: 77463 - DNA, 25 bp, Homo sapiens
ccctccagaaggtcacgtggttttc

SEQ ID NO: 77464 - DNA, 25 bp, Homo sapiens
tttggacagattacagggactcatg

SEQ ID NO: 77465 - DNA, 25 bp, Homo sapiens
ccctggttcagtggaagctcagaaa

SEQ ID NO: 77466 - DNA, 25 bp, Homo sapiens
atgccctttgtttcgaatgtctgtc

SEQ ID NO: 77467 - DNA, 25 bp, Homo sapiens
ggctctaagcacataacagggtttg

SEQ ID NO: 77468 - DNA, 25 bp, Homo sapiens
cagggctaaagggaagacgctcata

SEQ ID NO: 77469 - DNA, 25 bp, Homo sapiens
gttgcctgggctatggtactttaca

SEQ ID NO: 77470 - DNA, 25 bp, Homo sapiens
ctccttatttgaatgtactgcctta

SEQ ID NO: 77471 - DNA, 25 bp, Homo sapiens
ctgtagaatccacttactttggttc

SEQ ID NO: 77472 - DNA, 25 bp, Homo sapiens
cactggacctgctaaagactgaata

SEQ ID NO: 77473 - DNA, 25 bp, Homo sapiens
ccgtaggtagggctcaaaaacattt

SEQ ID NO: 77474 - DNA, 25 bp, Homo sapiens
ttacctactgctatgggctatgttg

SEQ ID NO: 77475 - DNA, 25 bp, Homo sapiens
gtgttcggtacactggccaagtttc

SEQ ID NO: 77476 - DNA, 25 bp, Homo sapiens
cttgggctttctcattgtacttgga

SEQ ID NO: 77477 - DNA, 25 bp, Homo sapiens
aaagaaaattaactatttaaagcac

SEQ ID NO: 77478 - DNA, 25 bp, Homo sapiens
gggaatgtggaaagaggttttagtg

SEQ ID NO: 77479 - DNA, 25 bp, Homo sapiens
ttctgtgttgtccatgtagctgctc

SEQ ID NO: 77480 - DNA, 25 bp, Homo sapiens
ggacccagattccagttcctctatg

SEQ ID NO: 77481 - DNA, 25 bp, Homo sapiens
ctggccctgcagcttctctttgtca

SEQ ID NO: 77482 - DNA, 25 bp, Homo sapiens
tccctgggtacataagcactgattc

SEQ ID NO: 77483 - DNA, 25 bp, Homo sapiens
ctgtgcttgatatggggcaatcttt

SEQ ID NO: 77484 - DNA, 25 bp, Homo sapiens
ctagctgttgcagtttgccgattca

SEQ ID NO: 77485 - DNA, 25 bp, Homo sapiens
acagttccttgcatcatccatggta

SEQ ID NO: 77486 - DNA, 25 bp, Homo sapiens
ggtcaggtccaccagcagtgaagta

SEQ ID NO: 77487 - DNA, 25 bp, Homo sapiens
tcagcctagtttggacatcatcttc

SEQ ID NO: 77488 - DNA, 25 bp, Homo sapiens
tgaactacccatccatcagctgagg

SEQ ID NO: 77489 - DNA, 25 bp, Homo sapiens
gttacatcaagactgtcaagtaaaa

SEQ ID NO: 77490 - DNA, 25 bp, Homo sapiens
ggggccagtcaacctacttctcttt

SEQ ID NO: 77491 - DNA, 25 bp, Homo sapiens
ttagcctgaagcgtagtcatttggc

SEQ ID NO: 77492 - DNA, 25 bp, Homo sapiens
gttcttctcaaataatgccttcagg

SEQ ID NO: 77493 - DNA, 25 bp, Homo sapiens
cagaggaaactctaatttaaagggg

SEQ ID NO: 77494 - DNA, 25 bp, Homo sapiens
ctgaagccagtgttttagaattttt

SEQ ID NO: 77495 - DNA, 25 bp, Homo sapiens
gccttttgcaactatggctgactta

SEQ ID NO: 77496 - DNA, 25 bp, Homo sapiens
gtcacctttgaaagcccagcagatg

SEQ ID NO: 77497 - DNA, 25 bp, Homo sapiens
ctccacgtgattcctacagcagttc

SEQ ID NO: 77498 - DNA, 25 bp, Homo sapiens
ggccattttgcctttctgacatttc

SEQ ID NO: 77499 - DNA, 25 bp, Homo sapiens
ctatgggaccaccaaaaaaaacgga

SEQ ID NO: 77500 - DNA, 25 bp, Homo sapiens
tggaaacccaatttctgcagctatg

SEQ ID NO: 77501 - DNA, 25 bp, Homo sapiens
cctcagcacatggtgttctcacata

SEQ ID NO: 77502 - DNA, 25 bp, Homo sapiens
tcaggggccctagcaaagcaattta

SEQ ID NO: 77503 - DNA, 25 bp, Homo sapiens
tgcttcgtcttaggtatccgttata

SEQ ID NO: 77504 - DNA, 25 bp, Homo sapiens
gggacttgtaatcctccttattgcc

SEQ ID NO: 77505 - DNA, 25 bp, Homo sapiens
ggagtttctccatccacctctggta

SEQ ID NO: 77506 - DNA, 25 bp, Homo sapiens
caagctacctttatccagaacagtt

SEQ ID NO: 77507 - DNA, 25 bp, Homo sapiens
tagtgaatgagcagataatcccttc

SEQ ID NO: 77508 - DNA, 25 bp, Homo sapiens
gtttctttttcacagggccctcatc

SEQ ID NO: 77509 - DNA, 25 bp, Homo sapiens
acctggttttgccttattccaagaa

SEQ ID NO: 77510 - DNA, 25 bp, Homo sapiens
agggtctgtatctccagtgatcata

SEQ ID NO: 77511 - DNA, 25 bp, Homo sapiens
tactgcttctgtgtccttaggccta

SEQ ID NO: 77512 - DNA, 25 bp, Homo sapiens
tcgctgcttcttgccttgtttaatg

SEQ ID NO: 77513 - DNA, 25 bp, Homo sapiens
aacgctaggggccagtttatccata

SEQ ID NO: 77514 - DNA, 25 bp, Homo sapiens
atttttataacctgttataagtatg

SEQ ID NO: 77515 - DNA, 25 bp, Homo sapiens
cagtggtttacctctagatttttac

SEQ ID NO: 77516 - DNA, 25 bp, Homo sapiens
gctggtagcgcaaaattaaactttc

SEQ ID NO: 77517 - DNA, 25 bp, Homo sapiens
gggacctccaggttgcagtatctta

SEQ ID NO: 77518 - DNA, 25 bp, Homo sapiens
ggccttgttatccttgccacattgg

SEQ ID NO: 77519 - DNA, 25 bp, Homo sapiens
tccacctgcaggagttgacctacca

SEQ ID NO: 77520 - DNA, 25 bp, Homo sapiens
ttcgtgagatcaccacctgatagta

SEQ ID NO: 77521 - DNA, 25 bp, Homo sapiens
ggggatcttcgtttttccatctgaa

SEQ ID NO: 77522 - DNA, 25 bp, Homo sapiens
ttcgttatgtacaggtcaaattttc

SEQ ID NO: 77523 - DNA, 25 bp, Homo sapiens
gcaccctgcttctcctggcttaata

SEQ ID NO: 77524 - DNA, 25 bp, Homo sapiens
ccaggctccttactctgtccaggta

SEQ ID NO: 77525 - DNA, 25 bp, Homo sapiens
acttgccacttagaaatgaggtata

SEQ ID NO: 77526 - DNA, 25 bp, Homo sapiens
ggctttatttcagacaaggtggata

SEQ ID NO: 77527 - DNA, 25 bp, Homo sapiens
gcttgctgtgaacttaccctttgga

SEQ ID NO: 77528 - DNA, 25 bp, Homo sapiens
tggtgaggaacccattagatatttc

SEQ ID NO: 77529 - DNA, 25 bp, Homo sapiens
ctgatatgcagtcacaagtaaaata

SEQ ID NO: 77530 - DNA, 25 bp, Homo sapiens
acaaaagctaacaaacagcaaaagt

SEQ ID NO: 77531 - DNA, 25 bp, Homo sapiens
ccagggcatgcactttggtactttt

SEQ ID NO: 77532 - DNA, 25 bp, Homo sapiens
ggggccagggttactactactcatg

SEQ ID NO: 77533 - DNA, 25 bp, Homo sapiens
gccaccaggtgaagcagtgctctta

SEQ ID NO: 77534 - DNA, 25 bp, Homo sapiens
agggctctttgtcttaggatagtta

SEQ ID NO: 77535 - DNA, 25 bp, Homo sapiens
gggttcttatcatctcccaggagag

SEQ ID NO: 77536 - DNA, 25 bp, Homo sapiens
cagcctgcctgtctcaatgggaatc

SEQ ID NO: 77537 - DNA, 25 bp, Homo sapiens
cgtctggctagctttcatggaaata

SEQ ID NO: 77538 - DNA, 25 bp, Homo sapiens
tgggctcctgtaaagatatcatctg

SEQ ID NO: 77539 - DNA, 25 bp, Homo sapiens
aaaagtctacgggaggagcccacca

SEQ ID NO: 77540 - DNA, 25 bp, Homo sapiens
ctcccatagccttccctagttaatg

SEQ ID NO: 77541 - DNA, 25 bp, Homo sapiens
tgcagtgtacactcatgcccataac

SEQ ID NO: 77542 - DNA, 25 bp, Homo sapiens
gtgcacataaaacatgcagaatatc

SEQ ID NO: 77543 - DNA, 25 bp, Homo sapiens
ttacattatcacatataatcactca

SEQ ID NO: 77544 - DNA, 25 bp, Homo sapiens
gtctcccgagattgcaaaatacaca

SEQ ID NO: 77545 - DNA, 25 bp, Homo sapiens
ggaactctttacctctgagcctttg

SEQ ID NO: 77546 - DNA, 25 bp, Homo sapiens
ccttttctaagatgtggctttcaga

SEQ ID NO: 77547 - DNA, 25 bp, Homo sapiens
ggtacataggtgtttttacagccca

SEQ ID NO: 77548 - DNA, 25 bp, Homo sapiens
acaatatggcagtcaagccatttca

SEQ ID NO: 77549 - DNA, 25 bp, Homo sapiens
ccaaagccctccgtattgtcatttt

SEQ ID NO: 77550 - DNA, 25 bp, Homo sapiens
gaggccaaggatccaaccacaatta

SEQ ID NO: 77551 - DNA, 25 bp, Homo sapiens
tgtggcctccactatgtttcgaatg

SEQ ID NO: 77552 - DNA, 25 bp, Homo sapiens
gggccattttcctaccacctcattt

SEQ ID NO: 77553 - DNA, 25 bp, Homo sapiens
ctgggctggttcttcatcttaaaca

SEQ ID NO: 77554 - DNA, 25 bp, Homo sapiens
gtcttgtctaacttgcctctaaatt

SEQ ID NO: 77555 - DNA, 25 bp, Homo sapiens
actggaagaaaggtgtctatccaca

SEQ ID NO: 77556 - DNA, 25 bp, Homo sapiens
cagggacagggacttctgatttaca

SEQ ID NO: 77557 - DNA, 25 bp, Homo sapiens
tgtcttccttgatttcgtctttttg

SEQ ID NO: 77558 - DNA, 25 bp, Homo sapiens
tggcttccagaattgcctgtgattc

SEQ ID NO: 77559 - DNA, 25 bp, Homo sapiens
acacacagaactggagagaacaatg

SEQ ID NO: 77560 - DNA, 25 bp, Homo sapiens
atggggctctcattcctagactaga

SEQ ID NO: 77561 - DNA, 25 bp, Homo sapiens
cttcatcctgagcagagctgttgta

SEQ ID NO: 77562 - DNA, 25 bp, Homo sapiens
ggcatgcctgatccttatttaaaac

SEQ ID NO: 77563 - DNA, 25 bp, Homo sapiens
ttctcttttcttcagggtgcaagca

SEQ ID NO: 77564 - DNA, 25 bp, Homo sapiens
tcggcactatgcaaacaagaacgta

SEQ ID NO: 77565 - DNA, 25 bp, Homo sapiens
ggccatagtcccagctttctcattg

SEQ ID NO: 77566 - DNA, 25 bp, Homo sapiens
catggcatgggttaagggtacctta

SEQ ID NO: 77567 - DNA, 25 bp, Homo sapiens
tgcctgtccagttgtggtcataaaa

SEQ ID NO: 77568 - DNA, 25 bp, Homo sapiens
cacttaatataacaatcatttcttt

SEQ ID NO: 77569 - DNA, 25 bp, Homo sapiens
ccatcagtgttccaggtagtgttta

SEQ ID NO: 77570 - DNA, 25 bp, Homo sapiens
accagcagtgggtgcagaaaacata

SEQ ID NO: 77571 - DNA, 25 bp, Homo sapiens
tgttcacagcccacagacccttttg

SEQ ID NO: 77572 - DNA, 25 bp, Homo sapiens
gccttgagacggttccattgctttc

SEQ ID NO: 77573 - DNA, 25 bp, Homo sapiens
tggctgctacatctcctctcatctg

SEQ ID NO: 77574 - DNA, 25 bp, Homo sapiens
gggactttttacagaatcaaggcca

SEQ ID NO: 77575 - DNA, 25 bp, Homo sapiens
ttgactggctctaaagttgatactg

SEQ ID NO: 77576 - DNA, 25 bp, Homo sapiens
cagataactttgctccaggtccaga

SEQ ID NO: 77577 - DNA, 25 bp, Homo sapiens
cccaggtcatgttgagctctatcta

SEQ ID NO: 77578 - DNA, 25 bp, Homo sapiens
ccttcttcagtgttgggagcttgta

SEQ ID NO: 77579 - DNA, 25 bp, Homo sapiens
tggagcaagcactaacaaggatttt

SEQ ID NO: 77580 - DNA, 25 bp, Homo sapiens
gtcagtcctgtcatgaggcagttca

SEQ ID NO: 77581 - DNA, 25 bp, Homo sapiens
ctgcaaaactttcccatggctggta

SEQ ID NO: 77582 - DNA, 25 bp, Homo sapiens
gcccaggacagacgcttttctattt

SEQ ID NO: 77583 - DNA, 25 bp, Homo sapiens
cacgggttatctgtttgcttccaaa

SEQ ID NO: 77584 - DNA, 25 bp, Homo sapiens
cgctatctgttgtgcctgtttctta

SEQ ID NO: 77585 - DNA, 25 bp, Homo sapiens
caggcattctacttgtctaagtttc

SEQ ID NO: 77586 - DNA, 25 bp, Homo sapiens
gtgtttgagccaggacgagatgggg

SEQ ID NO: 77587 - DNA, 25 bp, Homo sapiens
ggaggggtgctcagattaaattacc

SEQ ID NO: 77588 - DNA, 25 bp, Homo sapiens
tgggcgatcacacaacattttaaag

SEQ ID NO: 77589 - DNA, 25 bp, Homo sapiens
cactgtggtatgctttgcaaagacc

SEQ ID NO: 77590 - DNA, 25 bp, Homo sapiens
gctgcacttgcccaaagaaacactg

SEQ ID NO: 77591 - DNA, 25 bp, Homo sapiens
ttatttctacccataaatggagaca

SEQ ID NO: 77592 - DNA, 25 bp, Homo sapiens
tgacccagccaggaagtgttgaatg

SEQ ID NO: 77593 - DNA, 25 bp, Homo sapiens
gtaggcttcaagaatcccaagattg

SEQ ID NO: 77594 - DNA, 25 bp, Homo sapiens
ggggactctcctttacacttgtaaa

SEQ ID NO: 77595 - DNA, 25 bp, Homo sapiens
ctggctcaggaaggaaatgaatttc

SEQ ID NO: 77596 - DNA, 25 bp, Homo sapiens
actctcttgatcatacgggtacagc

SEQ ID NO: 77597 - DNA, 25 bp, Homo sapiens
tgcccagggttttatctctagattc

SEQ ID NO: 77598 - DNA, 25 bp, Homo sapiens
ttcacagattgtgtgggctccaaga

SEQ ID NO: 77599 - DNA, 25 bp, Homo sapiens
gacataggagtaatgtatagtggat

SEQ ID NO: 77600 - DNA, 25 bp, Homo sapiens
cgtctattacgtcttccagggtctc

SEQ ID NO: 77601 - DNA, 25 bp, Homo sapiens
ccaggttgcgttccctttggcttta

SEQ ID NO: 77602 - DNA, 25 bp, Homo sapiens
acctgcttcgttgtttgctttaatg

SEQ ID NO: 77603 - DNA, 25 bp, Homo sapiens
tctcaagcattgttcccagcaaagg

SEQ ID NO: 77604 - DNA, 25 bp, Homo sapiens
ggtcctcaatgatgtagctccatga

SEQ ID NO: 77605 - DNA, 25 bp, Homo sapiens
gggtgtccattactaaaaggaaaaa

SEQ ID NO: 77606 - DNA, 25 bp, Homo sapiens
ttcattttaataatccagctgctgg

SEQ ID NO: 77607 - DNA, 25 bp, Homo sapiens
cctttgtggtcaggatgatttgttt

SEQ ID NO: 77608 - DNA, 25 bp, Homo sapiens
agtggctttctgcattgtggcttaa

SEQ ID NO: 77609 - DNA, 25 bp, Homo sapiens
ttccaggctgaggaaccagtttttc

SEQ ID NO: 77610 - DNA, 25 bp, Homo sapiens
accctggtatccttaagcaaaatga

SEQ ID NO: 77611 - DNA, 25 bp, Homo sapiens
taagtctgtaaatctctggttgctc

SEQ ID NO: 77612 - DNA, 25 bp, Homo sapiens
cacgctattttttacagagatttta

SEQ ID NO: 77613 - DNA, 25 bp, Homo sapiens
ttaagctgtgcccaagaggtatcca

SEQ ID NO: 77614 - DNA, 25 bp, Homo sapiens
tcccggccaacccaagtagttactg

SEQ ID NO: 77615 - DNA, 25 bp, Homo sapiens
tgtccagcaagttctctctccatga

SEQ ID NO: 77616 - DNA, 25 bp, Homo sapiens
tctcacctgggcttgggattcaata

SEQ ID NO: 77617 - DNA, 25 bp, Homo sapiens
cacatggtgtgttcttcagggaagc

SEQ ID NO: 77618 - DNA, 25 bp, Homo sapiens
gtcacccatgtgatcagttattgca

SEQ ID NO: 77619 - DNA, 25 bp, Homo sapiens
tggacggtccagacaagctcttaga

SEQ ID NO: 77620 - DNA, 25 bp, Homo sapiens
tactggctacatgaagacctccttg

SEQ ID NO: 77621 - DNA, 25 bp, Homo sapiens
catgcccttttcagagagtgattca

SEQ ID NO: 77622 - DNA, 25 bp, Homo sapiens
gcttattttggctctgctggcttca

SEQ ID NO: 77623 - DNA, 25 bp, Homo sapiens
ttgacacttggccaacgcagcagta

SEQ ID NO: 77624 - DNA, 25 bp, Homo sapiens
gcttctctcctaacaagggactttt

SEQ ID NO: 77625 - DNA, 25 bp, Homo sapiens
gtgtcctaaggcgtcactatgtgta

SEQ ID NO: 77626 - DNA, 25 bp, Homo sapiens
tgcagtgagcacagagagaaatcca

SEQ ID NO: 77627 - DNA, 25 bp, Homo sapiens
caggcactggaaaggccattactca

SEQ ID NO: 77628 - DNA, 25 bp, Homo sapiens
gctggaatacacaccttaggcttgt

SEQ ID NO: 77629 - DNA, 25 bp, Homo sapiens
ggaaaatggcttagcagagctcctc

SEQ ID NO: 77630 - DNA, 25 bp, Homo sapiens
ccctgaatctattgcgagagcctca

SEQ ID NO: 77631 - DNA, 25 bp, Homo sapiens
agcctgatgggaaagaatgattttg

SEQ ID NO: 77632 - DNA, 25 bp, Homo sapiens
gggaagtcttcattctctttaaagg

SEQ ID NO: 77633 - DNA, 25 bp, Homo sapiens
cttccatggtgggagcaagtcaata

SEQ ID NO: 77634 - DNA, 25 bp, Homo sapiens
cttgatagatttgcacacatggaga

SEQ ID NO: 77635 - DNA, 25 bp, Homo sapiens
taaccagttctgcaaagccattatg

SEQ ID NO: 77636 - DNA, 25 bp, Homo sapiens
tgacagctctgaagacttcctctgg

SEQ ID NO: 77637 - DNA, 25 bp, Homo sapiens
ggccagttctggacaccttattaaa

SEQ ID NO: 77638 - DNA, 25 bp, Homo sapiens
ggtccttgcttttaagaaaccaaca

SEQ ID NO: 77639 - DNA, 25 bp, Homo sapiens
atgggtagaactagctttgattaga

SEQ ID NO: 77640 - DNA, 25 bp, Homo sapiens
tggtcaatatcctaactaatgaaaa

SEQ ID NO: 77641 - DNA, 25 bp, Homo sapiens
tcaatccagcctcctgtgaaacagg

SEQ ID NO: 77642 - DNA, 25 bp, Homo sapiens
gtccttgggaagctttgtatctttc

SEQ ID NO: 77643 - DNA, 25 bp, Homo sapiens
tccagaaagtattgatggtcccttc

SEQ ID NO: 77644 - DNA, 25 bp, Homo sapiens
gacctctcttccttttcatggcgtg

SEQ ID NO: 77645 - DNA, 25 bp, Homo sapiens
gaagaccatctgtgccctgctttga

SEQ ID NO: 77646 - DNA, 25 bp, Homo sapiens
gtggctcgcttttcttatcaatgtc

SEQ ID NO: 77647 - DNA, 25 bp, Homo sapiens
ggctgctctgcaaacctgttagtta

SEQ ID NO: 77648 - DNA, 25 bp, Homo sapiens
aagttgtgaaatctatttttttttt

SEQ ID NO: 77649 - DNA, 25 bp, Homo sapiens
agtcagttcaagtcatgttagtcta

SEQ ID NO: 77650 - DNA, 25 bp, Homo sapiens
agcatgttgaccagcgttatggaat

SEQ ID NO: 77651 - DNA, 25 bp, Homo sapiens
ctcactatgtcctattttctgcttg

SEQ ID NO: 77652 - DNA, 25 bp, Homo sapiens
ttgggactttaaagtagatccagat

SEQ ID NO: 77653 - DNA, 25 bp, Homo sapiens
tttcttcaaaggatctattatcccc

SEQ ID NO: 77654 - DNA, 25 bp, Homo sapiens
ggttgtgtggggtgcttaactgcca

SEQ ID NO: 77655 - DNA, 25 bp, Homo sapiens
tcacactttgctgacctggcacagg

SEQ ID NO: 77656 - DNA, 25 bp, Homo sapiens
cctgcttttcgtatctggttctcca

SEQ ID NO: 77657 - DNA, 25 bp, Homo sapiens
tttagtcccaagttctgctgcccgc

SEQ ID NO: 77658 - DNA, 25 bp, Homo sapiens
gtttatccatctatgcaccattgga

SEQ ID NO: 77659 - DNA, 25 bp, Homo sapiens
tggaatggaaaattatctatatcat

SEQ ID NO: 77660 - DNA, 25 bp, Homo sapiens
tggccactgtctacgtgcactgaga

SEQ ID NO: 77661 - DNA, 25 bp, Homo sapiens
tttattttatttttagacagggtct

SEQ ID NO: 77662 - DNA, 25 bp, Homo sapiens
aggactcgctgctaactctttgggc

SEQ ID NO: 77663 - DNA, 25 bp, Homo sapiens
ctttggggatatctttggccttgtc

SEQ ID NO: 77664 - DNA, 25 bp, Homo sapiens
tgtttctttagtgagtgaccatcgc

SEQ ID NO: 77665 - DNA, 25 bp, Homo sapiens
tgtagacaagtctcatcaatgattg

SEQ ID NO: 77666 - DNA, 25 bp, Homo sapiens
gccttgagtgtaaatgccaatatta

SEQ ID NO: 77667 - DNA, 25 bp, Homo sapiens
atcaggtggttttctttagacagtc

SEQ ID NO: 77668 - DNA, 25 bp, Homo sapiens
gagtagtgctcttccaacctgtaac

SEQ ID NO: 77669 - DNA, 25 bp, Homo sapiens
aaaacactttacataatctcagttc

SEQ ID NO: 77670 - DNA, 25 bp, Homo sapiens
tccggttcattaagggccaaaattt

SEQ ID NO: 77671 - DNA, 25 bp, Homo sapiens
gctgccaggcatgttgttttaataa

SEQ ID NO: 77672 - DNA, 25 bp, Homo sapiens
tctgggcgaggatcacactgaaata

SEQ ID NO: 77673 - DNA, 25 bp, Homo sapiens
gtggggtttgcatccttactggtaa

SEQ ID NO: 77674 - DNA, 25 bp, Homo sapiens
cgtgtcctatccgttttcttgaaga

SEQ ID NO: 77675 - DNA, 25 bp, Homo sapiens
ggcctgctgggaataggacttctaa

SEQ ID NO: 77676 - DNA, 25 bp, Homo sapiens
ttaaaaccaatctctctcagccttg

SEQ ID NO: 77677 - DNA, 25 bp, Homo sapiens
aatatattttactgatgtatacaat

SEQ ID NO: 77678 - DNA, 25 bp, Homo sapiens
ctgtgcttacacatacacggatttt

SEQ ID NO: 77679 - DNA, 25 bp, Homo sapiens
cttggccttagaatctgtcatttct

SEQ ID NO: 77680 - DNA, 25 bp, Homo sapiens
gttccaaactcataaaagtagattt

SEQ ID NO: 77681 - DNA, 25 bp, Homo sapiens
agtttaattcactactattttaatt

SEQ ID NO: 77682 - DNA, 25 bp, Homo sapiens
acccgtttgtttttatgtgccctca

SEQ ID NO: 77683 - DNA, 25 bp, Homo sapiens
cccattttggaattagctgcagatc

SEQ ID NO: 77684 - DNA, 25 bp, Homo sapiens
aggttattttggctcgctagctgta

SEQ ID NO: 77685 - DNA, 25 bp, Homo sapiens
ttgctgtccttcgtgggaatacttc

SEQ ID NO: 77686 - DNA, 25 bp, Homo sapiens
aaagtgtgtcctgctttcaagatgc

SEQ ID NO: 77687 - DNA, 25 bp, Homo sapiens
ttttcagccaagtacgccgatgtgc

SEQ ID NO: 77688 - DNA, 25 bp, Homo sapiens
gtcaacctttgtggagctctttctg

SEQ ID NO: 77689 - DNA, 25 bp, Homo sapiens
ccgggttttcttcctgtagcatttg

SEQ ID NO: 77690 - DNA, 25 bp, Homo sapiens
agtgccatcacaacgttatcttctg

SEQ ID NO: 77691 - DNA, 25 bp, Homo sapiens
gggtttaaaaaagtataggaagtta

SEQ ID NO: 77692 - DNA, 25 bp, Homo sapiens
atcagccttggtcagtcagagaatg

SEQ ID NO: 77693 - DNA, 25 bp, Homo sapiens
ctggtgtcagcatattctaggtgtt

SEQ ID NO: 77694 - DNA, 25 bp, Homo sapiens
ccagtcctattacttggaggcaacc

SEQ ID NO: 77695 - DNA, 25 bp, Homo sapiens
cgtgaggattctgtcagccctaaaa

SEQ ID NO: 77696 - DNA, 25 bp, Homo sapiens
actactatctgcctttggaggggaa

SEQ ID NO: 77697 - DNA, 25 bp, Homo sapiens
aaggcagatctgaattccctctaga

SEQ ID NO: 77698 - DNA, 25 bp, Homo sapiens
taggctgcttctcctttaacagggc

SEQ ID NO: 77699 - DNA, 25 bp, Homo sapiens
aggctactccttccacttctcagga

SEQ ID NO: 77700 - DNA, 25 bp, Homo sapiens
ttggagcctggtgctttaaaatctc

SEQ ID NO: 77701 - DNA, 25 bp, Homo sapiens
caacagatatctatgttattttgta

SEQ ID NO: 77702 - DNA, 25 bp, Homo sapiens
acggtggtctctatccattattaca

SEQ ID NO: 77703 - DNA, 25 bp, Homo sapiens
gccaggacctagtttcatttataga

SEQ ID NO: 77704 - DNA, 25 bp, Homo sapiens
tcagctttgtttccagttaatcagg

SEQ ID NO: 77705 - DNA, 25 bp, Homo sapiens
ccctgttaagggacactcaaaattt

SEQ ID NO: 77706 - DNA, 25 bp, Homo sapiens
catggccctgtttggagtatatagc

SEQ ID NO: 77707 - DNA, 25 bp, Homo sapiens
tccttctcagagatttagggtcaag

SEQ ID NO: 77708 - DNA, 25 bp, Homo sapiens
tgactgtattatcttatttttgttt

SEQ ID NO: 77709 - DNA, 25 bp, Homo sapiens
ttctggaattcactaaggcatcacc

SEQ ID NO: 77710 - DNA, 25 bp, Homo sapiens
ttgggccagaagagagatagaccta

SEQ ID NO: 77711 - DNA, 25 bp, Homo sapiens
ctcacgtgaggtagcccttagtgtc

SEQ ID NO: 77712 - DNA, 25 bp, Homo sapiens
cctgtcctatgtgaatgttgcttta

SEQ ID NO: 77713 - DNA, 25 bp, Homo sapiens
ctggtaggaaccactggacccatta

SEQ ID NO: 77714 - DNA, 25 bp, Homo sapiens
ccttggcccgggtaaacttgataga

SEQ ID NO: 77715 - DNA, 25 bp, Homo sapiens
aaaaaaactactaaatcttacaacc

SEQ ID NO: 77716 - DNA, 25 bp, Homo sapiens
agaaatatattgtccactgctaccc

SEQ ID NO: 77717 - DNA, 25 bp, Homo sapiens
agcctgttgcctgtttgattcatga

SEQ ID NO: 77718 - DNA, 25 bp, Homo sapiens
cccaccaggcatttaggaggcatta

SEQ ID NO: 77719 - DNA, 25 bp, Homo sapiens
ggggcagccacagcttctttcttca

SEQ ID NO: 77720 - DNA, 25 bp, Homo sapiens
gctgtggctgcaactcctttggaaa

SEQ ID NO: 77721 - DNA, 25 bp, Homo sapiens
cctctgcttgctaggggaccttatg

SEQ ID NO: 77722 - DNA, 25 bp, Homo sapiens
cagtcctctgctacccagggtttta

SEQ ID NO: 77723 - DNA, 25 bp, Homo sapiens
accaggctgctagtgtctcaagaga

SEQ ID NO: 77724 - DNA, 25 bp, Homo sapiens
ctctaggcacaagggaaaggcatta

SEQ ID NO: 77725 - DNA, 25 bp, Homo sapiens
tggctcatcagcgtctcctccttga

SEQ ID NO: 77726 - DNA, 25 bp, Homo sapiens
agtacagtctctctgctctggcagg

SEQ ID NO: 77727 - DNA, 25 bp, Homo sapiens
gttcctttgctttgtggccctctga

SEQ ID NO: 77728 - DNA, 25 bp, Homo sapiens
cccaggggagctctgaattcgtttt

SEQ ID NO: 77729 - DNA, 25 bp, Homo sapiens
cacaggcttgtgctcattccatgaa

SEQ ID NO: 77730 - DNA, 25 bp, Homo sapiens
ggcattgccgatgaaagagtccttc

SEQ ID NO: 77731 - DNA, 25 bp, Homo sapiens
tcctgggtccctggttaaaatcatg

SEQ ID NO: 77732 - DNA, 25 bp, Homo sapiens
ggtagctacgtcaccctattcaatg

SEQ ID NO: 77733 - DNA, 25 bp, Homo sapiens
tgccgcctccacaggaagcttgttt

SEQ ID NO: 77734 - DNA, 25 bp, Homo sapiens
ccagagtgtgctatggctgttctta

SEQ ID NO: 77735 - DNA, 25 bp, Homo sapiens
catctctaattcaggactgtcccaa

SEQ ID NO: 77736 - DNA, 25 bp, Homo sapiens
gcttagcggagttaaccattcagca

SEQ ID NO: 77737 - DNA, 25 bp, Homo sapiens
tggcccatcctctggaaagaaaata

SEQ ID NO: 77738 - DNA, 25 bp, Homo sapiens
catgagtgtcagctttccaagagta

SEQ ID NO: 77739 - DNA, 25 bp, Homo sapiens
ctgtccaggtggaaaactgctcaaa

SEQ ID NO: 77740 - DNA, 25 bp, Homo sapiens
gaacatgctgcccttagtttggaca

SEQ ID NO: 77741 - DNA, 25 bp, Homo sapiens
actgtattcacttttaaagccagta

SEQ ID NO: 77742 - DNA, 25 bp, Homo sapiens
cccagcctaggggacaaaaatccca

SEQ ID NO: 77743 - DNA, 25 bp, Homo sapiens
ttatttgatagaatcctcaccacag

SEQ ID NO: 77744 - DNA, 25 bp, Homo sapiens
gccagcgctgtgactgaaccatctg

SEQ ID NO: 77745 - DNA, 25 bp, Homo sapiens
cagcttgctgtagtcatgccttcca

SEQ ID NO: 77746 - DNA, 25 bp, Homo sapiens
actctgttgggcaagtttctaaatc

SEQ ID NO: 77747 - DNA, 25 bp, Homo sapiens
cagctggcttcctccttgtacaaca

SEQ ID NO: 77748 - DNA, 25 bp, Homo sapiens
actcgggcgctatactcaggttttg

SEQ ID NO: 77749 - DNA, 25 bp, Homo sapiens
ctttggcattcgctggaggcatttc

SEQ ID NO: 77750 - DNA, 25 bp, Homo sapiens
tctattctgaaccactggtcttaaa

SEQ ID NO: 77751 - DNA, 25 bp, Homo sapiens
ttttgctgatcactgatcgagcaaa

SEQ ID NO: 77752 - DNA, 25 bp, Homo sapiens
tgatcagcagggtaaaggacaactc

SEQ ID NO: 77753 - DNA, 25 bp, Homo sapiens
cattgacattcaggagacagcccta

SEQ ID NO: 77754 - DNA, 25 bp, Homo sapiens
aagccaggaacttatcaatggcatc

SEQ ID NO: 77755 - DNA, 25 bp, Homo sapiens
ggcctctttttgttggttccactca

SEQ ID NO: 77756 - DNA, 25 bp, Homo sapiens
agcaccttgctgtgagctctccttg

SEQ ID NO: 77757 - DNA, 25 bp, Homo sapiens
gggtcccacctctcaggcttggtca

SEQ ID NO: 77758 - DNA, 25 bp, Homo sapiens
agcacaaatcaaagccatggttatg

SEQ ID NO: 77759 - DNA, 25 bp, Homo sapiens
ctagattctaagttgcctgcagtga

SEQ ID NO: 77760 - DNA, 25 bp, Homo sapiens
ggtatcagatgctcaatgtcttaca

SEQ ID NO: 77761 - DNA, 25 bp, Homo sapiens
actcaatagaacatgggcaaattca

SEQ ID NO: 77762 - DNA, 25 bp, Homo sapiens
tgccagtacatcacctaagcccttg

SEQ ID NO: 77763 - DNA, 25 bp, Homo sapiens
tttggatcttgacctggcctctgga

SEQ ID NO: 77764 - DNA, 25 bp, Homo sapiens
taaaagcaaaaaatgtagtattggc

SEQ ID NO: 77765 - DNA, 25 bp, Homo sapiens
tgagccctcatagcaagcattttgg

SEQ ID NO: 77766 - DNA, 25 bp, Homo sapiens
atgccctggctgttcctaacgtgtc

SEQ ID NO: 77767 - DNA, 25 bp, Homo sapiens
gactcagcagctgaagcttctcttt

SEQ ID NO: 77768 - DNA, 25 bp, Homo sapiens
ttattaatttaaaagacttcaaaag

SEQ ID NO: 77769 - DNA, 25 bp, Homo sapiens
taatcaatgaatacttttgaaaaat

SEQ ID NO: 77770 - DNA, 25 bp, Homo sapiens
aatgccctgtggatttgtcagaaga

SEQ ID NO: 77771 - DNA, 25 bp, Homo sapiens
caggagagatttacttgtgtacagc

SEQ ID NO: 77772 - DNA, 25 bp, Homo sapiens
agcccaacaaaggtgatttgggaaa

SEQ ID NO: 77773 - DNA, 25 bp, Homo sapiens
ggggtgtctactgtcctaacctgtc

SEQ ID NO: 77774 - DNA, 25 bp, Homo sapiens
tacaaggttttgctgggactaattc

SEQ ID NO: 77775 - DNA, 25 bp, Homo sapiens
acccaggaaccttgtgtcagaagta

SEQ ID NO: 77776 - DNA, 25 bp, Homo sapiens
aaaagtattcacttcccacactctg

SEQ ID NO: 77777 - DNA, 25 bp, Homo sapiens
acaaacaatcatgtccagtttttta

SEQ ID NO: 77778 - DNA, 25 bp, Homo sapiens
cagcttatcaggttgcttccgaaca

SEQ ID NO: 77779 - DNA, 25 bp, Homo sapiens
ttgtctccctcagtaccaacgttga

SEQ ID NO: 77780 - DNA, 25 bp, Homo sapiens
tgtgcaactttctggcatacctctg

SEQ ID NO: 77781 - DNA, 25 bp, Homo sapiens
ggaccctgatcttaccctggttttc

SEQ ID NO: 77782 - DNA, 25 bp, Homo sapiens
gcagccgttagacttccttcagatg

SEQ ID NO: 77783 - DNA, 25 bp, Homo sapiens
caaagttggctgttgttccgtggca

SEQ ID NO: 77784 - DNA, 25 bp, Homo sapiens
tctgccttggcactttgactttctg

SEQ ID NO: 77785 - DNA, 25 bp, Homo sapiens
cagggatatgttaaggccattctca

SEQ ID NO: 77786 - DNA, 25 bp, Homo sapiens
tggagctgctacgttagtcttgaac

SEQ ID NO: 77787 - DNA, 25 bp, Homo sapiens
ttggcatcatctgggaggaacactc

SEQ ID NO: 77788 - DNA, 25 bp, Homo sapiens
ctggcgtgtgcttttcccaaactca

SEQ ID NO: 77789 - DNA, 25 bp, Homo sapiens
gtaggctttcatgtgcaccagaata

SEQ ID NO: 77790 - DNA, 25 bp, Homo sapiens
gcctgcctggcatgtagaaacttca

SEQ ID NO: 77791 - DNA, 25 bp, Homo sapiens
ggacaggtctagctacaatcacagg

SEQ ID NO: 77792 - DNA, 25 bp, Homo sapiens
gggtggtcttaactccctaagctgc

SEQ ID NO: 77793 - DNA, 25 bp, Homo sapiens
gggcagaccctatcaggagccatta

SEQ ID NO: 77794 - DNA, 25 bp, Homo sapiens
ggccaccctagacgtttgagacatt

SEQ ID NO: 77795 - DNA, 25 bp, Homo sapiens
agcagcttctatttgggcctctttg

SEQ ID NO: 77796 - DNA, 25 bp, Homo sapiens
tatctgggcctctagctgacacatg

SEQ ID NO: 77797 - DNA, 25 bp, Homo sapiens
agggtccaatttgccagactttatc

SEQ ID NO: 77798 - DNA, 25 bp, Homo sapiens
gcaacaaaataaaactactctgatt

SEQ ID NO: 77799 - DNA, 25 bp, Homo sapiens
tgtgagtagctctcccagcacaata

SEQ ID NO: 77800 - DNA, 25 bp, Homo sapiens
tgctcgctttctatgtcaggctttc

SEQ ID NO: 77801 - DNA, 25 bp, Homo sapiens
tcccgggcctggtatcatgtgataa

SEQ ID NO: 77802 - DNA, 25 bp, Homo sapiens
cctgcctggtatctgggcctagaaa

SEQ ID NO: 77803 - DNA, 25 bp, Homo sapiens
ggcacctagtcatgtccaaagcaga

SEQ ID NO: 77804 - DNA, 25 bp, Homo sapiens
tgctcagcctgggatgcgaatattg

SEQ ID NO: 77805 - DNA, 25 bp, Homo sapiens
gggatctctgccttctctcgttttc

SEQ ID NO: 77806 - DNA, 25 bp, Homo sapiens
ccggtttctctgtgtggcctttttc

SEQ ID NO: 77807 - DNA, 25 bp, Homo sapiens
ggccagcttgacttcctagcaaatt

SEQ ID NO: 77808 - DNA, 25 bp, Homo sapiens
gcagaggcttcttgggtcacaccca

SEQ ID NO: 77809 - DNA, 25 bp, Homo sapiens
aagcctgtttagtctttgtcatagc

SEQ ID NO: 77810 - DNA, 25 bp, Homo sapiens
caggctcctgtagggcataattttc

SEQ ID NO: 77811 - DNA, 25 bp, Homo sapiens
ggccagtcattcgtcaggagcttta

SEQ ID NO: 77812 - DNA, 25 bp, Homo sapiens
cagccttgctctatccacagtggaa

SEQ ID NO: 77813 - DNA, 25 bp, Homo sapiens
ctcagacaggcatcacaagggtata

SEQ ID NO: 77814 - DNA, 25 bp, Homo sapiens
ggtccagctcacagtgcccttcttg

SEQ ID NO: 77815 - DNA, 25 bp, Homo sapiens
cctacatcgatgacactgggctctg

SEQ ID NO: 77816 - DNA, 25 bp, Homo sapiens
ggtaggcaccgacagaattctcttg

SEQ ID NO: 77817 - DNA, 25 bp, Homo sapiens
ggtgcatgttcagcctcctcagcta

SEQ ID NO: 77818 - DNA, 25 bp, Homo sapiens
tcgatggctatgcactgagtcagtc

SEQ ID NO: 77819 - DNA, 25 bp, Homo sapiens
cggtcttcggatttagctaattaca

SEQ ID NO: 77820 - DNA, 25 bp, Homo sapiens
ttctcttggctgtaggcaatctcta

SEQ ID NO: 77821 - DNA, 25 bp, Homo sapiens
ccacagctttcttcaagggatagtc

SEQ ID NO: 77822 - DNA, 25 bp, Homo sapiens
gcggttgatttcatctcagcacttg

SEQ ID NO: 77823 - DNA, 25 bp, Homo sapiens
gggtaataagtcaagggcatctcta

SEQ ID NO: 77824 - DNA, 25 bp, Homo sapiens
cccgtatagatctcagcccacagtg

SEQ ID NO: 77825 - DNA, 25 bp, Homo sapiens
agggcagaccactcccatctaattc

SEQ ID NO: 77826 - DNA, 25 bp, Homo sapiens
ctgggcacaagagctagggcatatt

SEQ ID NO: 77827 - DNA, 25 bp, Homo sapiens
tcctccttgccatcagaaatcagtc

SEQ ID NO: 77828 - DNA, 25 bp, Homo sapiens
ccagatgtcttacaggtcaagtttc

SEQ ID NO: 77829 - DNA, 25 bp, Homo sapiens
tgcagaaagcatcccttggctcaga

SEQ ID NO: 77830 - DNA, 25 bp, Homo sapiens
gtggcactttcgctcctacattcta

SEQ ID NO: 77831 - DNA, 25 bp, Homo sapiens
gggaacttcctcttccttagagttg

SEQ ID NO: 77832 - DNA, 25 bp, Homo sapiens
agagcggatgccataaatgcgtttc

SEQ ID NO: 77833 - DNA, 25 bp, Homo sapiens
cgctccatgtcaggaagagtgtgta

SEQ ID NO: 77834 - DNA, 25 bp, Homo sapiens
tctgggcttaggtctctgtctacta

SEQ ID NO: 77835 - DNA, 25 bp, Homo sapiens
tgctagggactctgccataaacctg

SEQ ID NO: 77836 - DNA, 25 bp, Homo sapiens
gctgctgctcagctgtcaccatatg

SEQ ID NO: 77837 - DNA, 25 bp, Homo sapiens
catgccatgaagagccgctggttta

SEQ ID NO: 77838 - DNA, 25 bp, Homo sapiens
ggcaatcctgagttccacgtaagtc

SEQ ID NO: 77839 - DNA, 25 bp, Homo sapiens
ccctgctggagaaagtctgtcaacc

SEQ ID NO: 77840 - DNA, 25 bp, Homo sapiens
ggcgatagaagcagaacaggcctaa

SEQ ID NO: 77841 - DNA, 25 bp, Homo sapiens
tgcctgcatgagctcctgtgaatcc

SEQ ID NO: 77842 - DNA, 25 bp, Homo sapiens
gcaggccctgccagagcttctttga

SEQ ID NO: 77843 - DNA, 25 bp, Homo sapiens
aggcaaggcttcttcacataggagc

SEQ ID NO: 77844 - DNA, 25 bp, Homo sapiens
cacagcctggtgcatttgcctgatc

SEQ ID NO: 77845 - DNA, 25 bp, Homo sapiens
tgcttacaaggccagcccatgctta

SEQ ID NO: 77846 - DNA, 25 bp, Homo sapiens
gggcctcccactagcttaatttctg

SEQ ID NO: 77847 - DNA, 25 bp, Homo sapiens
acaaataattttttgttagaaatgt

SEQ ID NO: 77848 - DNA, 25 bp, Homo sapiens
ctcatggacttagagcatcttaggc

SEQ ID NO: 77849 - DNA, 25 bp, Homo sapiens
acagtgtcctgcattgggcctatga

SEQ ID NO: 77850 - DNA, 25 bp, Homo sapiens
aaccagctgttcttggcccttactg

SEQ ID NO: 77851 - DNA, 25 bp, Homo sapiens
gcggtaggcctatccagtagctttg

SEQ ID NO: 77852 - DNA, 25 bp, Homo sapiens
ttggggataatcattcactggactc

SEQ ID NO: 77853 - DNA, 25 bp, Homo sapiens
gggaagaccaccaacctgcagttta

SEQ ID NO: 77854 - DNA, 25 bp, Homo sapiens
ctccatctgggccaaggcattcaga

SEQ ID NO: 77855 - DNA, 25 bp, Homo sapiens
ggggctttcagcacattctgcttca

SEQ ID NO: 77856 - DNA, 25 bp, Homo sapiens
tgccgctgtgtcaaactggggaaaa

SEQ ID NO: 77857 - DNA, 25 bp, Homo sapiens
ctagatctttcatgagccaggtttc

SEQ ID NO: 77858 - DNA, 25 bp, Homo sapiens
gaacaagctcactggcagcctaata

SEQ ID NO: 77859 - DNA, 25 bp, Homo sapiens
tttttaaaaaaggaatgatgggaaa

SEQ ID NO: 77860 - DNA, 25 bp, Homo sapiens
gtttactgccctgttaactttgtta

SEQ ID NO: 77861 - DNA, 25 bp, Homo sapiens
ggcttttagtaacctcaggcacata

SEQ ID NO: 77862 - DNA, 25 bp, Homo sapiens
ggtggtcctgattctactatcttga

SEQ ID NO: 77863 - DNA, 25 bp, Homo sapiens
cctgttggccatgaaggtgaaaacc

SEQ ID NO: 77864 - DNA, 25 bp, Homo sapiens
tcggcaagacccaattcaagtacta

SEQ ID NO: 77865 - DNA, 25 bp, Homo sapiens
caggcagcattccacagaggtacta

SEQ ID NO: 77866 - DNA, 25 bp, Homo sapiens
ccatcaatatggtgtgctcgggcta

SEQ ID NO: 77867 - DNA, 25 bp, Homo sapiens
gccctaagaccgtggtgagtatttc

SEQ ID NO: 77868 - DNA, 25 bp, Homo sapiens
gagccgaatctatagtgcagttttg

SEQ ID NO: 77869 - DNA, 25 bp, Homo sapiens
ttgtgcctgaccagcatagctcttc

SEQ ID NO: 77870 - DNA, 25 bp, Homo sapiens
tgggacctcactgaccagagttttg

SEQ ID NO: 77871 - DNA, 25 bp, Homo sapiens
tcttgcactgaattaggacttgtcc

SEQ ID NO: 77872 - DNA, 25 bp, Homo sapiens
atggggctctccttagtgtttttga

SEQ ID NO: 77873 - DNA, 25 bp, Homo sapiens
ggcacttggctcattattccttgaa

SEQ ID NO: 77874 - DNA, 25 bp, Homo sapiens
ggtggagtccatcactgcatttgtg

SEQ ID NO: 77875 - DNA, 25 bp, Homo sapiens
agagtgctgatgtttccctagaaaa

SEQ ID NO: 77876 - DNA, 25 bp, Homo sapiens
cacttggttttctgctgacatttta

SEQ ID NO: 77877 - DNA, 25 bp, Homo sapiens
ttctgtctcctcagtgccctgtatg

SEQ ID NO: 77878 - DNA, 25 bp, Homo sapiens
ctcctttaatacactcaaaagaaca

SEQ ID NO: 77879 - DNA, 25 bp, Homo sapiens
ctacattcaggaaatgtagaataat

SEQ ID NO: 77880 - DNA, 25 bp, Homo sapiens
actcttggataacagctgtggtgta

SEQ ID NO: 77881 - DNA, 25 bp, Homo sapiens
tcatacttgagagcagcagcctggc

SEQ ID NO: 77882 - DNA, 25 bp, Homo sapiens
gtcccttgcaaaagagaaagctgta

SEQ ID NO: 77883 - DNA, 25 bp, Homo sapiens
tgaggcggggtttacaccttttatc

SEQ ID NO: 77884 - DNA, 25 bp, Homo sapiens
catcctccagggtggttgctttgta

SEQ ID NO: 77885 - DNA, 25 bp, Homo sapiens
gtgcctccactctccattattaata

SEQ ID NO: 77886 - DNA, 25 bp, Homo sapiens
tgcagccttctgcttgatcctcata

SEQ ID NO: 77887 - DNA, 25 bp, Homo sapiens
ggcaggtatcccattccatttgaca

SEQ ID NO: 77888 - DNA, 25 bp, Homo sapiens
ggcagttctggtcatggtccttcta

SEQ ID NO: 77889 - DNA, 25 bp, Homo sapiens
ggtctacttagggatcacactctgg

SEQ ID NO: 77890 - DNA, 25 bp, Homo sapiens
tcccaccgaaatgcctgaaaagata

SEQ ID NO: 77891 - DNA, 25 bp, Homo sapiens
gcctcacgttctcttcatgggacca

SEQ ID NO: 77892 - DNA, 25 bp, Homo sapiens
tcgtgccatttctggattgttcata

SEQ ID NO: 77893 - DNA, 25 bp, Homo sapiens
aggagctgctgccaatatttcttca

SEQ ID NO: 77894 - DNA, 25 bp, Homo sapiens
gtctgggatggtagaaaacttcctc

SEQ ID NO: 77895 - DNA, 25 bp, Homo sapiens
tggtgcaattttccctttggccata

SEQ ID NO: 77896 - DNA, 25 bp, Homo sapiens
aactgctgtgtcttaggctatcatg

SEQ ID NO: 77897 - DNA, 25 bp, Homo sapiens
ccacaattggagagatgccttcttc

SEQ ID NO: 77898 - DNA, 25 bp, Homo sapiens
ggggagcccttcaccatcacagaca

SEQ ID NO: 77899 - DNA, 25 bp, Homo sapiens
tttcccttccgtggcttcagcaaga

SEQ ID NO: 77900 - DNA, 25 bp, Homo sapiens
atcaaggtaacctgctattgccctt

SEQ ID NO: 77901 - DNA, 25 bp, Homo sapiens
cacatgcctggttcttcctctaaga

SEQ ID NO: 77902 - DNA, 25 bp, Homo sapiens
agccaagtcctacatgctgggttta

SEQ ID NO: 77903 - DNA, 25 bp, Homo sapiens
gacggtattattttcagatcctgga

SEQ ID NO: 77904 - DNA, 25 bp, Homo sapiens
ggagtctagctctgccaaccatttg

SEQ ID NO: 77905 - DNA, 25 bp, Homo sapiens
ccttgggatgctcagtaaatttttc

SEQ ID NO: 77906 - DNA, 25 bp, Homo sapiens
caggtttgccaagaggttgtgtttc

SEQ ID NO: 77907 - DNA, 25 bp, Homo sapiens
tggttgtgtatctttagcaggtttt

SEQ ID NO: 77908 - DNA, 25 bp, Homo sapiens
gtaagagacatggtacctgtacttg

SEQ ID NO: 77909 - DNA, 25 bp, Homo sapiens
gcagcgtaatttttcgcatcttgaa

SEQ ID NO: 77910 - DNA, 25 bp, Homo sapiens
tcattttggggtcacatgtggactc

SEQ ID NO: 77911 - DNA, 25 bp, Homo sapiens
acctcaatgcttgcaagggtccagc

SEQ ID NO: 77912 - DNA, 25 bp, Homo sapiens
caaggggtgaagttatgagatcatc

SEQ ID NO: 77913 - DNA, 25 bp, Homo sapiens
ggaaaagctgcttctgccatactga

SEQ ID NO: 77914 - DNA, 25 bp, Homo sapiens
agagccttgtgtcatgccttcatta

SEQ ID NO: 77915 - DNA, 25 bp, Homo sapiens
ccagttggccacattcattgtttca

SEQ ID NO: 77916 - DNA, 25 bp, Homo sapiens
ggcctcagggctttgcagttgaatg

SEQ ID NO: 77917 - DNA, 25 bp, Homo sapiens
aacacggtctgtggcttcagctaca

SEQ ID NO: 77918 - DNA, 25 bp, Homo sapiens
agtctctttctacaggggcttatca

SEQ ID NO: 77919 - DNA, 25 bp, Homo sapiens
tgatctcaaggagctacttccatta

SEQ ID NO: 77920 - DNA, 25 bp, Homo sapiens
tctgctccaggaaatggtcatcgtc

SEQ ID NO: 77921 - DNA, 25 bp, Homo sapiens
ctcctgttggtgtgtcctgttgata

SEQ ID NO: 77922 - DNA, 25 bp, Homo sapiens
gttcagtcttttcacctcccaatta

SEQ ID NO: 77923 - DNA, 25 bp, Homo sapiens
cgaggtggatcttccagccctatta

SEQ ID NO: 77924 - DNA, 25 bp, Homo sapiens
gaggtctgtccttaacatgccatta

SEQ ID NO: 77925 - DNA, 25 bp, Homo sapiens
accaagtttccgagtgcccagatta

SEQ ID NO: 77926 - DNA, 25 bp, Homo sapiens
tcctggctttatgctggtgatcagc

SEQ ID NO: 77927 - DNA, 25 bp, Homo sapiens
gtggattcccacacaccgccagaaa

SEQ ID NO: 77928 - DNA, 25 bp, Homo sapiens
ccaggcaaagcccaggttaggaatt

SEQ ID NO: 77929 - DNA, 25 bp, Homo sapiens
gccaggtgtccagatacccaggttg

SEQ ID NO: 77930 - DNA, 25 bp, Homo sapiens
ggggtgccctttgactctataaata

SEQ ID NO: 77931 - DNA, 25 bp, Homo sapiens
tccaagggctctgaaaatgactctc

SEQ ID NO: 77932 - DNA, 25 bp, Homo sapiens
gcagcagggatagcacatatgccta

SEQ ID NO: 77933 - DNA, 25 bp, Homo sapiens
agcatttcagcagagatttcagttc

SEQ ID NO: 77934 - DNA, 25 bp, Homo sapiens
cccaaggtatttgacaattcagata

SEQ ID NO: 77935 - DNA, 25 bp, Homo sapiens
tagggataagagttttcataagaag

SEQ ID NO: 77936 - DNA, 25 bp, Homo sapiens
gcctggcaactcgacacctttctta

SEQ ID NO: 77937 - DNA, 25 bp, Homo sapiens
gcccatcaggttccaaattaagctc

SEQ ID NO: 77938 - DNA, 25 bp, Homo sapiens
cagatgttatcaattgcagttcaag

SEQ ID NO: 77939 - DNA, 25 bp, Homo sapiens
aaaagatattaggaaagtaaattgt

SEQ ID NO: 77940 - DNA, 25 bp, Homo sapiens
tcctaagtctggctttgagaaccaa

SEQ ID NO: 77941 - DNA, 25 bp, Homo sapiens
gagctcccaggaagatggcaatttc

SEQ ID NO: 77942 - DNA, 25 bp, Homo sapiens
gagtcatattctccttttcaacagg

SEQ ID NO: 77943 - DNA, 25 bp, Homo sapiens
aaatccaccttttacctgtgctaaa

SEQ ID NO: 77944 - DNA, 25 bp, Homo sapiens
aggcagacctatctgctctcagtta

SEQ ID NO: 77945 - DNA, 25 bp, Homo sapiens
ctgtgtacatctttagcaggaagta

SEQ ID NO: 77946 - DNA, 25 bp, Homo sapiens
ttactaaattctacatgtgcatagt

SEQ ID NO: 77947 - DNA, 25 bp, Homo sapiens
tgctcctaacagtcgcctttcaatg

SEQ ID NO: 77948 - DNA, 25 bp, Homo sapiens
ctgcttcccgtcagcccatgtaatg

SEQ ID NO: 77949 - DNA, 25 bp, Homo sapiens
acgctggtcacctgggctgtatttt

SEQ ID NO: 77950 - DNA, 25 bp, Homo sapiens
ggttaagctcaattcagttggcctg

SEQ ID NO: 77951 - DNA, 25 bp, Homo sapiens
gctggttggcttcacggacatttaa

SEQ ID NO: 77952 - DNA, 25 bp, Homo sapiens
tgcctccgattgtgcctgtatcatg

SEQ ID NO: 77953 - DNA, 25 bp, Homo sapiens
cccaggatgtcagcccaagagagtt

SEQ ID NO: 77954 - DNA, 25 bp, Homo sapiens
gcggcattccagatgtgcatgtgtg

SEQ ID NO: 77955 - DNA, 25 bp, Homo sapiens
ggcccgtcctattatgggtcaaata

SEQ ID NO: 77956 - DNA, 25 bp, Homo sapiens
aagcaacacagcttgcaagaataga

SEQ ID NO: 77957 - DNA, 25 bp, Homo sapiens
aacccacgcctgagttaggtatgtg

SEQ ID NO: 77958 - DNA, 25 bp, Homo sapiens
ggccaccaatgcttagacccaaaga

SEQ ID NO: 77959 - DNA, 25 bp, Homo sapiens
ggacctaccagtttgcaccatttta

SEQ ID NO: 77960 - DNA, 25 bp, Homo sapiens
ctcatttcttttactggggtgcaga

SEQ ID NO: 77961 - DNA, 25 bp, Homo sapiens
tccacagggcctaaacattgttatc

SEQ ID NO: 77962 - DNA, 25 bp, Homo sapiens
tgggactttactgactttactatgc

SEQ ID NO: 77963 - DNA, 25 bp, Homo sapiens
tggagactcctactaacctggctgt

SEQ ID NO: 77964 - DNA, 25 bp, Homo sapiens
tccttgggaacacactgagctttta

SEQ ID NO: 77965 - DNA, 25 bp, Homo sapiens
gcactcctcagtggctaagtaccta

SEQ ID NO: 77966 - DNA, 25 bp, Homo sapiens
gcatcatgtccagataccatgttta

SEQ ID NO: 77967 - DNA, 25 bp, Homo sapiens
ctgcctggaaaagtttgggtaaatc

SEQ ID NO: 77968 - DNA, 25 bp, Homo sapiens
ggagtctagcattaaccagagagtg

SEQ ID NO: 77969 - DNA, 25 bp, Homo sapiens
gagttcctccatccttgcagtgtga

SEQ ID NO: 77970 - DNA, 25 bp, Homo sapiens
tgcatcctgtgtgagcctgtgtaac

SEQ ID NO: 77971 - DNA, 25 bp, Homo sapiens
ggcagtcttactcttccctcagagg

SEQ ID NO: 77972 - DNA, 25 bp, Homo sapiens
cactgatatagctgaatggtcttcc

SEQ ID NO: 77973 - DNA, 25 bp, Homo sapiens
ctcagcaacatcagcaggtcattta

SEQ ID NO: 77974 - DNA, 25 bp, Homo sapiens
tctctggcctggaagtgcactaatc

SEQ ID NO: 77975 - DNA, 25 bp, Homo sapiens
ggccctgggttgaatcgctgtaaaa

SEQ ID NO: 77976 - DNA, 25 bp, Homo sapiens
cgttttgtatggaaagccctttacg

SEQ ID NO: 77977 - DNA, 25 bp, Homo sapiens
acctttatgccactctagatctgta

SEQ ID NO: 77978 - DNA, 25 bp, Homo sapiens
ggtgccactcacaaagacatcctta

SEQ ID NO: 77979 - DNA, 25 bp, Homo sapiens
cccagctcatttcagtgtcagtaaa

SEQ ID NO: 77980 - DNA, 25 bp, Homo sapiens
ggccacgctagcatcaaagttattt

SEQ ID NO: 77981 - DNA, 25 bp, Homo sapiens
gccaataaggctaatagagttactg

SEQ ID NO: 77982 - DNA, 25 bp, Homo sapiens
ttaatctctggattgagtggtcctg

SEQ ID NO: 77983 - DNA, 25 bp, Homo sapiens
tacccatttggagcatatccttcta

SEQ ID NO: 77984 - DNA, 25 bp, Homo sapiens
tgggctccacctgggaaagatattc

SEQ ID NO: 77985 - DNA, 25 bp, Homo sapiens
ggaacggtttcctggagtgaacaca

SEQ ID NO: 77986 - DNA, 25 bp, Homo sapiens
agaagccagggaactacgggatttg

SEQ ID NO: 77987 - DNA, 25 bp, Homo sapiens
gacagattcaacagagggctccata

SEQ ID NO: 77988 - DNA, 25 bp, Homo sapiens
ttgtgatcctccaagtctgctttga

SEQ ID NO: 77989 - DNA, 25 bp, Homo sapiens
tcagggatcctgcacactttatgtc

SEQ ID NO: 77990 - DNA, 25 bp, Homo sapiens
gaacccaggggttgccattcatagg

SEQ ID NO: 77991 - DNA, 25 bp, Homo sapiens
cgctgtcaatctctaacgcaggtga

SEQ ID NO: 77992 - DNA, 25 bp, Homo sapiens
tgcctgatgcagagatgaccgtttc

SEQ ID NO: 77993 - DNA, 25 bp, Homo sapiens
ctttctgccgaaactcgctcatttg

SEQ ID NO: 77994 - DNA, 25 bp, Homo sapiens
ctgctcccagtgtatgaggattttg

SEQ ID NO: 77995 - DNA, 25 bp, Homo sapiens
tgggtgtttactgggcagcatcaaa

SEQ ID NO: 77996 - DNA, 25 bp, Homo sapiens
cgctgctgccctcggtagtaacaga

SEQ ID NO: 77997 - DNA, 25 bp, Homo sapiens
tgcttctcccagctgaccgtcgtta

SEQ ID NO: 77998 - DNA, 25 bp, Homo sapiens
ccacgactggtcttagaaaaggagc

SEQ ID NO: 77999 - DNA, 25 bp, Homo sapiens
tgagtcccagaccaagaggtttagc

SEQ ID NO: 78000 - DNA, 25 bp, Homo sapiens
ctcctggaagagctgagagcccttt

SEQ ID NO: 78001 - DNA, 25 bp, Homo sapiens
gcacctggctttggctgatgaaaaa

SEQ ID NO: 78002 - DNA, 25 bp, Homo sapiens
tgcaatcctctatggtggcctggta

SEQ ID NO: 78003 - DNA, 25 bp, Homo sapiens
ggatcccaaagtgatgcttcccttc

SEQ ID NO: 78004 - DNA, 25 bp, Homo sapiens
agccagggattctcaaggtctttga

SEQ ID NO: 78005 - DNA, 25 bp, Homo sapiens
gatttccttccttctctgcctaaga

SEQ ID NO: 78006 - DNA, 25 bp, Homo sapiens
cagctatatctccataagccactta

SEQ ID NO: 78007 - DNA, 25 bp, Homo sapiens
ccacagaatggccagcagtctatgc

SEQ ID NO: 78008 - DNA, 25 bp, Homo sapiens
cctggccttttccatagctgtgata

SEQ ID NO: 78009 - DNA, 25 bp, Homo sapiens
tactgttctggtctggaaatcccta

SEQ ID NO: 78010 - DNA, 25 bp, Homo sapiens
gggtggaacttcctataggctttta

SEQ ID NO: 78011 - DNA, 25 bp, Homo sapiens
ctcaggcatgtcttggaaagccaca

SEQ ID NO: 78012 - DNA, 25 bp, Homo sapiens
agcctgtcccaacatggcaggaaaa

SEQ ID NO: 78013 - DNA, 25 bp, Homo sapiens
ggctgtttcctttgctcatgccaca

SEQ ID NO: 78014 - DNA, 25 bp, Homo sapiens
tgttcgttttttaagccagtgcaga

SEQ ID NO: 78015 - DNA, 25 bp, Homo sapiens
cttataaggcctcctaagtgccaat

SEQ ID NO: 78016 - DNA, 25 bp, Homo sapiens
ccaggagcatgggaataagtcagtc

SEQ ID NO: 78017 - DNA, 25 bp, Homo sapiens
ggctgctgtgcatctttggaaaaac

SEQ ID NO: 78018 - DNA, 25 bp, Homo sapiens
cactgtctttttgagggcctgcgta

SEQ ID NO: 78019 - DNA, 25 bp, Homo sapiens
cccagatgtccctgagtttcaaaga

SEQ ID NO: 78020 - DNA, 25 bp, Homo sapiens
gaggggactttgactaaaaatatta

SEQ ID NO: 78021 - DNA, 25 bp, Homo sapiens
gggagataaggccggggttatcttc

SEQ ID NO: 78022 - DNA, 25 bp, Homo sapiens
cgggtttcccttgctgttatcttta

SEQ ID NO: 78023 - DNA, 25 bp, Homo sapiens
gcacagggacccatcagtacatttg

SEQ ID NO: 78024 - DNA, 25 bp, Homo sapiens
ccgtggcattggcaaagctattgca

SEQ ID NO: 78025 - DNA, 25 bp, Homo sapiens
agctagtctgtcctgctatatggta

SEQ ID NO: 78026 - DNA, 25 bp, Homo sapiens
tcacaaagtcagttccctcaccatg

SEQ ID NO: 78027 - DNA, 25 bp, Homo sapiens
gccggcagcctttcccaaagaaatg

SEQ ID NO: 78028 - DNA, 25 bp, Homo sapiens
gggaggacaggcctttgaaacttca

SEQ ID NO: 78029 - DNA, 25 bp, Homo sapiens
gccagtgccattagtttgaccaata

SEQ ID NO: 78030 - DNA, 25 bp, Homo sapiens
tactgaagccagcaatagtctcctt

SEQ ID NO: 78031 - DNA, 25 bp, Homo sapiens
acttggcccagacagtgttaaaaca

SEQ ID NO: 78032 - DNA, 25 bp, Homo sapiens
atacgttttctttccaagagatgat

SEQ ID NO: 78033 - DNA, 25 bp, Homo sapiens
ttacaccaactcactttattcattt

SEQ ID NO: 78034 - DNA, 25 bp, Homo sapiens
agcagatcatgttgccaggccatta

SEQ ID NO: 78035 - DNA, 25 bp, Homo sapiens
gtttggttcaaacagcactgtggta

SEQ ID NO: 78036 - DNA, 25 bp, Homo sapiens
aaggcacttggaatgggaacccaca

SEQ ID NO: 78037 - DNA, 25 bp, Homo sapiens
tcttcctgatatatatgtgtgcgtg

SEQ ID NO: 78038 - DNA, 25 bp, Homo sapiens
cctgggcttggtgtgcaaatttaca

SEQ ID NO: 78039 - DNA, 25 bp, Homo sapiens
agtgggaaccactttttcatttcac

SEQ ID NO: 78040 - DNA, 25 bp, Homo sapiens
cagaagggctttgaccacggagatc

SEQ ID NO: 78041 - DNA, 25 bp, Homo sapiens
gctaccacacttgagaagagtcttg

SEQ ID NO: 78042 - DNA, 25 bp, Homo sapiens
accgtctcgttttgaggcagctaca

SEQ ID NO: 78043 - DNA, 25 bp, Homo sapiens
agccttcaccagtagttttctcttg

SEQ ID NO: 78044 - DNA, 25 bp, Homo sapiens
ttttcttctgtgagagcctttgagc

SEQ ID NO: 78045 - DNA, 25 bp, Homo sapiens
actagcctgtgatgtggtctctttg

SEQ ID NO: 78046 - DNA, 25 bp, Homo sapiens
agccctggtggtactcttgaactga

SEQ ID NO: 78047 - DNA, 25 bp, Homo sapiens
aggtctctgaggtaacaaagttcta

SEQ ID NO: 78048 - DNA, 25 bp, Homo sapiens
taacctgtaggtctttgggatcctg

SEQ ID NO: 78049 - DNA, 25 bp, Homo sapiens
gagtgaatgaatgtgcaatatgatt

SEQ ID NO: 78050 - DNA, 25 bp, Homo sapiens
ctcttggctgtttgagaggcctcta

SEQ ID NO: 78051 - DNA, 25 bp, Homo sapiens
acctccttcctgtctggtgctagaa

SEQ ID NO: 78052 - DNA, 25 bp, Homo sapiens
tgagtgcctagttgtaccttctttg

SEQ ID NO: 78053 - DNA, 25 bp, Homo sapiens
gctcttgctcttgatctgttggtta

SEQ ID NO: 78054 - DNA, 25 bp, Homo sapiens
gggccaatggctcttaaaagctaca

SEQ ID NO: 78055 - DNA, 25 bp, Homo sapiens
tcttcccagagaaggagtcatcaca

SEQ ID NO: 78056 - DNA, 25 bp, Homo sapiens
acacactgctgctatggatatgctg

SEQ ID NO: 78057 - DNA, 25 bp, Homo sapiens
ggcaggctctgtctcatggacagta

SEQ ID NO: 78058 - DNA, 25 bp, Homo sapiens
ttcctgccctccagaagtttgctta

SEQ ID NO: 78059 - DNA, 25 bp, Homo sapiens
ccctctgcttttaggacggcaggta

SEQ ID NO: 78060 - DNA, 25 bp, Homo sapiens
tgcccttgaattggtccagagttta

SEQ ID NO: 78061 - DNA, 25 bp, Homo sapiens
ggctttcctaacacttgaatactta

SEQ ID NO: 78062 - DNA, 25 bp, Homo sapiens
ttcgtcgtgtgtatgttagctctta

SEQ ID NO: 78063 - DNA, 25 bp, Homo sapiens
cttttgtgtactggaattctataaa

SEQ ID NO: 78064 - DNA, 25 bp, Homo sapiens
ggaagctccctgtaactattggttg

SEQ ID NO: 78065 - DNA, 25 bp, Homo sapiens
caaaacctgtttgagttgacatgta

SEQ ID NO: 78066 - DNA, 25 bp, Homo sapiens
agtctgtatagaaaagcttagtacg

SEQ ID NO: 78067 - DNA, 25 bp, Homo sapiens
ttgtcactgaagcatggggaatacc

SEQ ID NO: 78068 - DNA, 25 bp, Homo sapiens
accttcagcctagagcacagattgg

SEQ ID NO: 78069 - DNA, 25 bp, Homo sapiens
agcaggctgtcctcagttttttaca

SEQ ID NO: 78070 - DNA, 25 bp, Homo sapiens
tggggtccttcactgccaagcatta

SEQ ID NO: 78071 - DNA, 25 bp, Homo sapiens
ggatagaaaatatggtttcagtgtt

SEQ ID NO: 78072 - DNA, 25 bp, Homo sapiens
tatttttcccctaatgtatataaaa

SEQ ID NO: 78073 - DNA, 25 bp, Homo sapiens
gcttccaccagtctcttttccttta

SEQ ID NO: 78074 - DNA, 25 bp, Homo sapiens
ctgcatccctgtctggccattgtga

SEQ ID NO: 78075 - DNA, 25 bp, Homo sapiens
agccattcttcttgcaggacccatc

SEQ ID NO: 78076 - DNA, 25 bp, Homo sapiens
ctggagtccaggtgaggaaacattc

SEQ ID NO: 78077 - DNA, 25 bp, Homo sapiens
ctgggcccttttcgcaagcattata

SEQ ID NO: 78078 - DNA, 25 bp, Homo sapiens
cgccctgggcttcatgaggcaaatt

SEQ ID NO: 78079 - DNA, 25 bp, Homo sapiens
gctggcttgcttaccttctcctcta

SEQ ID NO: 78080 - DNA, 25 bp, Homo sapiens
gttggcaccacacctagggctcttt

SEQ ID NO: 78081 - DNA, 25 bp, Homo sapiens
ggtgcccaagccctgtcaacttttc

SEQ ID NO: 78082 - DNA, 25 bp, Homo sapiens
cggcagcctgtgagccaacagattt

SEQ ID NO: 78083 - DNA, 25 bp, Homo sapiens
gttcacttgaccacccatctgtagg

SEQ ID NO: 78084 - DNA, 25 bp, Homo sapiens
tctgccaggtgacgaacgacacttc

SEQ ID NO: 78085 - DNA, 25 bp, Homo sapiens
ccctgtagaccctaagaggaatctg

SEQ ID NO: 78086 - DNA, 25 bp, Homo sapiens
gcactcacctttttcatcctttgta

SEQ ID NO: 78087 - DNA, 25 bp, Homo sapiens
tggtcgcgcatacattggaaaggta

SEQ ID NO: 78088 - DNA, 25 bp, Homo sapiens
tctgcctagagcaccaacgtgggta

SEQ ID NO: 78089 - DNA, 25 bp, Homo sapiens
tctggcttcctcctgggtacttata

SEQ ID NO: 78090 - DNA, 25 bp, Homo sapiens
gcggttggtacttccttgcattctc

SEQ ID NO: 78091 - DNA, 25 bp, Homo sapiens
tccactgtgatttgctcttgactga

SEQ ID NO: 78092 - DNA, 25 bp, Homo sapiens
agacaacctctactggtcatgatga

SEQ ID NO: 78093 - DNA, 25 bp, Homo sapiens
tttccccactaaaaagtctgcacaa

SEQ ID NO: 78094 - DNA, 25 bp, Homo sapiens
gtgaagcactccctctccagttgaa

SEQ ID NO: 78095 - DNA, 25 bp, Homo sapiens
actaagatggtgatgtcagcatccc

SEQ ID NO: 78096 - DNA, 25 bp, Homo sapiens
ccacatatacatgtatgtatgttta

SEQ ID NO: 78097 - DNA, 25 bp, Homo sapiens
ttttgtttggcaatccagaagtaaa

SEQ ID NO: 78098 - DNA, 25 bp, Homo sapiens
gtcttgggctctactcgatggcata

SEQ ID NO: 78099 - DNA, 25 bp, Homo sapiens
ggtagtcacttatttccttctggaa

SEQ ID NO: 78100 - DNA, 25 bp, Homo sapiens
gaattatatcttaatagagatgtca

SEQ ID NO: 78101 - DNA, 25 bp, Homo sapiens
tctggagaacacacactaatacatg

SEQ ID NO: 78102 - DNA, 25 bp, Homo sapiens
aacctcagttttggatgaacacttc

SEQ ID NO: 78103 - DNA, 25 bp, Homo sapiens
tgcggctgaaggtttttccacattc

SEQ ID NO: 78104 - DNA, 25 bp, Homo sapiens
gactcgctttttcttgtaatctgga

SEQ ID NO: 78105 - DNA, 25 bp, Homo sapiens
tcatctagcaggagacaggaaaact

SEQ ID NO: 78106 - DNA, 25 bp, Homo sapiens
aggggccaatcttcctctgagatca

SEQ ID NO: 78107 - DNA, 25 bp, Homo sapiens
ctaggttcaagagtggccaaaagtt

SEQ ID NO: 78108 - DNA, 25 bp, Homo sapiens
gatgcagtttatgtagtccttttca

SEQ ID NO: 78109 - DNA, 25 bp, Homo sapiens
ctccaacttaactgactaaacttta

SEQ ID NO: 78110 - DNA, 25 bp, Homo sapiens
accagaccaggttcatgacaaatta

SEQ ID NO: 78111 - DNA, 25 bp, Homo sapiens
gtttttcctgtatcaacagtccatg

SEQ ID NO: 78112 - DNA, 25 bp, Homo sapiens
aacgagtgccagatgctagagcttc

SEQ ID NO: 78113 - DNA, 25 bp, Homo sapiens
aggaattttgcccagtgactgtccc

SEQ ID NO: 78114 - DNA, 25 bp, Homo sapiens
aaagaaaattttccctccctctgga

SEQ ID NO: 78115 - DNA, 25 bp, Homo sapiens
agcctgtctgactacctggatataa

SEQ ID NO: 78116 - DNA, 25 bp, Homo sapiens
cgtgcgtcgtttccatcgttgttta

SEQ ID NO: 78117 - DNA, 25 bp, Homo sapiens
gttcactccaagatactccctatta

SEQ ID NO: 78118 - DNA, 25 bp, Homo sapiens
attgtttgctttgttttacatgcct

SEQ ID NO: 78119 - DNA, 25 bp, Homo sapiens
tgcacgaatgtatgcatatagattc

SEQ ID NO: 78120 - DNA, 25 bp, Homo sapiens
tttgtggctatttttttttaaggtc

SEQ ID NO: 78121 - DNA, 25 bp, Homo sapiens
ttaagatgctgccaagacccaattc

SEQ ID NO: 78122 - DNA, 25 bp, Homo sapiens
gtctctaggtatgagctgtgctttc

SEQ ID NO: 78123 - DNA, 25 bp, Homo sapiens
ccttgggcccatttctgttgcagta

SEQ ID NO: 78124 - DNA, 25 bp, Homo sapiens
ggtgggtcttttggctcctaactcc

SEQ ID NO: 78125 - DNA, 25 bp, Homo sapiens
tgagtccctggaaagcatgcaatag

SEQ ID NO: 78126 - DNA, 25 bp, Homo sapiens
ctggccctcaggtgatgtgaatata

SEQ ID NO: 78127 - DNA, 25 bp, Homo sapiens
tggcatctttgagtcgctggtaaac

SEQ ID NO: 78128 - DNA, 25 bp, Homo sapiens
ttcactgtagctagagggacttttc

SEQ ID NO: 78129 - DNA, 25 bp, Homo sapiens
ctgacctctgagttacactggaata

SEQ ID NO: 78130 - DNA, 25 bp, Homo sapiens
agccaagagctcctgtgaattaata

SEQ ID NO: 78131 - DNA, 25 bp, Homo sapiens
caatataactgggaagtgggatttc

SEQ ID NO: 78132 - DNA, 25 bp, Homo sapiens
gctccattaattccagggcatctga

SEQ ID NO: 78133 - DNA, 25 bp, Homo sapiens
tggggcatgagctcctccaacatga

SEQ ID NO: 78134 - DNA, 25 bp, Homo sapiens
ttcaggctctgcatgttggctagga

SEQ ID NO: 78135 - DNA, 25 bp, Homo sapiens
tgctagagctatcttgcaggacctc

SEQ ID NO: 78136 - DNA, 25 bp, Homo sapiens
ggcttccactccaagtacctgctga

SEQ ID NO: 78137 - DNA, 25 bp, Homo sapiens
tttcagtatgaaaaggactgatttt

SEQ ID NO: 78138 - DNA, 25 bp, Homo sapiens
gtggatcagcttgtggtatccagct

SEQ ID NO: 78139 - DNA, 25 bp, Homo sapiens
ctggaatatcttggcatcctacata

SEQ ID NO: 78140 - DNA, 25 bp, Homo sapiens
ctcaggctgcacctaggttgaaatg

SEQ ID NO: 78141 - DNA, 25 bp, Homo sapiens
gtccttaatatcttgggcaccattg

SEQ ID NO: 78142 - DNA, 25 bp, Homo sapiens
tataagaacagcctatctgtccttc

SEQ ID NO: 78143 - DNA, 25 bp, Homo sapiens
gtgtgttggatcctctaaactatcc

SEQ ID NO: 78144 - DNA, 25 bp, Homo sapiens
tccacctgctgttgttttatttaca

SEQ ID NO: 78145 - DNA, 25 bp, Homo sapiens
gacatattcgaagcattaacgcttc

SEQ ID NO: 78146 - DNA, 25 bp, Homo sapiens
ccttgatgaaaaactgtgacgtcca

SEQ ID NO: 78147 - DNA, 25 bp, Homo sapiens
tgacgtcaccctctcccttgttgga

SEQ ID NO: 78148 - DNA, 25 bp, Homo sapiens
ttcccgggcctagataaaaagtctc

SEQ ID NO: 78149 - DNA, 25 bp, Homo sapiens
gcccgggttctggtccacatatgtt

SEQ ID NO: 78150 - DNA, 25 bp, Homo sapiens
ttgggcagttgtccagcagtctact

SEQ ID NO: 78151 - DNA, 25 bp, Homo sapiens
tgtcccactcgtttttgcatataga

SEQ ID NO: 78152 - DNA, 25 bp, Homo sapiens
tggtcaggaatgttatgattccttt

SEQ ID NO: 78153 - DNA, 25 bp, Homo sapiens
tgactccaatcccagtgctcactgc

SEQ ID NO: 78154 - DNA, 25 bp, Homo sapiens
caaccctgagtgtgactgttttcca

SEQ ID NO: 78155 - DNA, 25 bp, Homo sapiens
cgaggcgcgggcattcattatttta

SEQ ID NO: 78156 - DNA, 25 bp, Homo sapiens
gacgtcatgccttcctctgggttca

SEQ ID NO: 78157 - DNA, 25 bp, Homo sapiens
gctagcctgagtacacacattcttg

SEQ ID NO: 78158 - DNA, 25 bp, Homo sapiens
agctctcattggtacacgggacgca

SEQ ID NO: 78159 - DNA, 25 bp, Homo sapiens
cgctaggtggtacacacatctgttt

SEQ ID NO: 78160 - DNA, 25 bp, Homo sapiens
ttctccacgtagcactcaaggcatg

SEQ ID NO: 78161 - DNA, 25 bp, Homo sapiens
taacagtccctttggtgctggcctc

SEQ ID NO: 78162 - DNA, 25 bp, Homo sapiens
cgaagttaactctattcagtctgtc

SEQ ID NO: 78163 - DNA, 25 bp, Homo sapiens
ctatttcagctggactttcctaaca

SEQ ID NO: 78164 - DNA, 25 bp, Homo sapiens
ctgatctaccacttgctacttgtta

SEQ ID NO: 78165 - DNA, 25 bp, Homo sapiens
cctaagggactgaccagaagggctc

SEQ ID NO: 78166 - DNA, 25 bp, Homo sapiens
gcccacacgacgctgagttattaaa

SEQ ID NO: 78167 - DNA, 25 bp, Homo sapiens
cggggagctgctcttgataaaaaca

SEQ ID NO: 78168 - DNA, 25 bp, Homo sapiens
gcccttccgctgtataactggttca

SEQ ID NO: 78169 - DNA, 25 bp, Homo sapiens
cagtttttgtaccagctgtccaagg

SEQ ID NO: 78170 - DNA, 25 bp, Homo sapiens
ccagcagtgggcttgagttataata

SEQ ID NO: 78171 - DNA, 25 bp, Homo sapiens
tggggacctgactaattggcaaatc

SEQ ID NO: 78172 - DNA, 25 bp, Homo sapiens
tggcaggtggcaatttattacttta

SEQ ID NO: 78173 - DNA, 25 bp, Homo sapiens
gtttattaataaaatagattgttca

SEQ ID NO: 78174 - DNA, 25 bp, Homo sapiens
gtgacccagcacagaataaaccatg

SEQ ID NO: 78175 - DNA, 25 bp, Homo sapiens
attccaggtgctcagggtcaagaca

SEQ ID NO: 78176 - DNA, 25 bp, Homo sapiens
acagaaccagaggaggaagcatcta

SEQ ID NO: 78177 - DNA, 25 bp, Homo sapiens
cgcagtcttgccagggagaaaaata

SEQ ID NO: 78178 - DNA, 25 bp, Homo sapiens
ctcaaagccctttcgcctagacgtg

SEQ ID NO: 78179 - DNA, 25 bp, Homo sapiens
ctcagtgatctgaacctgcaacagg

SEQ ID NO: 78180 - DNA, 25 bp, Homo sapiens
gggcccagagtttcacccatctagc

SEQ ID NO: 78181 - DNA, 25 bp, Homo sapiens
gaaagctcactgtcatgcctgccta

SEQ ID NO: 78182 - DNA, 25 bp, Homo sapiens
gcagctcactgcaggtaactggtta

SEQ ID NO: 78183 - DNA, 25 bp, Homo sapiens
agaattactgctgtgactgggaccc

SEQ ID NO: 78184 - DNA, 25 bp, Homo sapiens
tcagtgcctttcatggtgggacatc

SEQ ID NO: 78185 - DNA, 25 bp, Homo sapiens
tgctctccttaaccgtactcatgtg

SEQ ID NO: 78186 - DNA, 25 bp, Homo sapiens
ccctactggactctgaaagccttga

SEQ ID NO: 78187 - DNA, 25 bp, Homo sapiens
cagtgaaaagtccagcaacatgatc

SEQ ID NO: 78188 - DNA, 25 bp, Homo sapiens
caagtgctgtgttccctgaagatcc

SEQ ID NO: 78189 - DNA, 25 bp, Homo sapiens
ttaaggcccttcgtaggctgagccc

SEQ ID NO: 78190 - DNA, 25 bp, Homo sapiens
cttccaacttgggtgctaatagctc

SEQ ID NO: 78191 - DNA, 25 bp, Homo sapiens
gacacatgggccttgacctcagcta

SEQ ID NO: 78192 - DNA, 25 bp, Homo sapiens
tcccacctgtgagtattggaaagcc

SEQ ID NO: 78193 - DNA, 25 bp, Homo sapiens
tcaacactgctctggggactattcc

SEQ ID NO: 78194 - DNA, 25 bp, Homo sapiens
gtaaatcttttagcccagtgccagg

SEQ ID NO: 78195 - DNA, 25 bp, Homo sapiens
tccggcctctcccttggcttagatg

SEQ ID NO: 78196 - DNA, 25 bp, Homo sapiens
gaagcccaggatctgcccacagtga

SEQ ID NO: 78197 - DNA, 25 bp, Homo sapiens
tccctctgagctgtaccatcctgta

SEQ ID NO: 78198 - DNA, 25 bp, Homo sapiens
cgtgctataattgcttctgctctca

SEQ ID NO: 78199 - DNA, 25 bp, Homo sapiens
tggatctcgcaatggccactcgttg

SEQ ID NO: 78200 - DNA, 25 bp, Homo sapiens
atctgccctagatctgccttgtagg

SEQ ID NO: 78201 - DNA, 25 bp, Homo sapiens
agggcattcaatttaccgcagtgga

SEQ ID NO: 78202 - DNA, 25 bp, Homo sapiens
ggctgggcccttcacttttacgttt

SEQ ID NO: 78203 - DNA, 25 bp, Homo sapiens
atcgcacctgccttaacccaatggg

SEQ ID NO: 78204 - DNA, 25 bp, Homo sapiens
gggcctcccagtagaaaggtgagcc

SEQ ID NO: 78205 - DNA, 25 bp, Homo sapiens
gcagctcccagtccttatctgaaag

SEQ ID NO: 78206 - DNA, 25 bp, Homo sapiens
gaccgggctcaggaattcaattgtg

SEQ ID NO: 78207 - DNA, 25 bp, Homo sapiens
cctgcctggtgacaataatgtgctc

SEQ ID NO: 78208 - DNA, 25 bp, Homo sapiens
ccctgtccttgtggtgagtctattt

SEQ ID NO: 78209 - DNA, 25 bp, Homo sapiens
ccagcgtagtttcaggagccacaga

SEQ ID NO: 78210 - DNA, 25 bp, Homo sapiens
ctgcagatctttggggtcttagacc

SEQ ID NO: 78211 - DNA, 25 bp, Homo sapiens
cgctgtgtgatcctctgtcttccta

SEQ ID NO: 78212 - DNA, 25 bp, Homo sapiens
aaggctcttattttttaaagtagtg

SEQ ID NO: 78213 - DNA, 25 bp, Homo sapiens
cctgatcgcttgaccttgctgcata

SEQ ID NO: 78214 - DNA, 25 bp, Homo sapiens
acctaggtcttctggagtgcccgaa

SEQ ID NO: 78215 - DNA, 25 bp, Homo sapiens
gcgcagagactcacgttagaccttc

SEQ ID NO: 78216 - DNA, 25 bp, Homo sapiens
ccctcccttgagtgatggctgtgtg

SEQ ID NO: 78217 - DNA, 25 bp, Homo sapiens
tccactccctggaaggcagcttttt

SEQ ID NO: 78218 - DNA, 25 bp, Homo sapiens
gcctcaagcatatttgggtgtccca

SEQ ID NO: 78219 - DNA, 25 bp, Homo sapiens
ccaccttccttttgcatcgtagatc

SEQ ID NO: 78220 - DNA, 25 bp, Homo sapiens
agccactgtgtcttttgggtagata

SEQ ID NO: 78221 - DNA, 25 bp, Homo sapiens
caatacaaaaggatttcttaaagat

SEQ ID NO: 78222 - DNA, 25 bp, Homo sapiens
tgagtaccctatgcctctcctggga

SEQ ID NO: 78223 - DNA, 25 bp, Homo sapiens
ccggaaactcctgtgatgaactctg

SEQ ID NO: 78224 - DNA, 25 bp, Homo sapiens
gaaccctgaatgtccctgctctgta

SEQ ID NO: 78225 - DNA, 25 bp, Homo sapiens
ggcagtggggagcatattaaacatt

SEQ ID NO: 78226 - DNA, 25 bp, Homo sapiens
ctgtcttcaggcaagtctgacatca

SEQ ID NO: 78227 - DNA, 25 bp, Homo sapiens
catgtggtgtgtctatgtattaaac

SEQ ID NO: 78228 - DNA, 25 bp, Homo sapiens
tgtttaaatcaataaagttggctta

SEQ ID NO: 78229 - DNA, 25 bp, Homo sapiens
ttcatgagaaaacaaagttctggta

SEQ ID NO: 78230 - DNA, 25 bp, Homo sapiens
agttacattgttcagaatgataaag

SEQ ID NO: 78231 - DNA, 25 bp, Homo sapiens
cacttgcccattaatagaggttgta

SEQ ID NO: 78232 - DNA, 25 bp, Homo sapiens
tgactcatctctcaggcttctgctg

SEQ ID NO: 78233 - DNA, 25 bp, Homo sapiens
ttcgtgagatcaacaaaagccatta

SEQ ID NO: 78234 - DNA, 25 bp, Homo sapiens
gccaggttctggtttctgcacacta

SEQ ID NO: 78235 - DNA, 25 bp, Homo sapiens
tggaaggcccatttatcagcagttg

SEQ ID NO: 78236 - DNA, 25 bp, Homo sapiens
ccagccctgctgagaggtatatatt

SEQ ID NO: 78237 - DNA, 25 bp, Homo sapiens
gacaaaacatgggtttggtatattc

SEQ ID NO: 78238 - DNA, 25 bp, Homo sapiens
cacctggtttgtatctgcggctcta

SEQ ID NO: 78239 - DNA, 25 bp, Homo sapiens
actgtttgccatgcccttagacttg

SEQ ID NO: 78240 - DNA, 25 bp, Homo sapiens
ggccaggatcagcatgtttctcatt

SEQ ID NO: 78241 - DNA, 25 bp, Homo sapiens
gggttgcacaaattaacatcagctc

SEQ ID NO: 78242 - DNA, 25 bp, Homo sapiens
ttttatcatctttgcagatttattt

SEQ ID NO: 78243 - DNA, 25 bp, Homo sapiens
gccaatctccggtctagggtcttga

SEQ ID NO: 78244 - DNA, 25 bp, Homo sapiens
gcacatgtgtccagcctcagggtca

SEQ ID NO: 78245 - DNA, 25 bp, Homo sapiens
agggtgctactctttctataacatg

SEQ ID NO: 78246 - DNA, 25 bp, Homo sapiens
gcaagctagcatttggagagaaaaa

SEQ ID NO: 78247 - DNA, 25 bp, Homo sapiens
agccctctgtttggtgctctctctc

SEQ ID NO: 78248 - DNA, 25 bp, Homo sapiens
acgggtagcttcacagagtcatgtc

SEQ ID NO: 78249 - DNA, 25 bp, Homo sapiens
ggcggcctgctctgatgtaacttct

SEQ ID NO: 78250 - DNA, 25 bp, Homo sapiens
cccagggactctggaaacagtgata

SEQ ID NO: 78251 - DNA, 25 bp, Homo sapiens
acttggaatggctcagtgcaagccc

SEQ ID NO: 78252 - DNA, 25 bp, Homo sapiens
gctgagttctctgaccacgcttttc

SEQ ID NO: 78253 - DNA, 25 bp, Homo sapiens
atggctgatgttgtcccagctatct

SEQ ID NO: 78254 - DNA, 25 bp, Homo sapiens
agacgctagacctggccaattctgg

SEQ ID NO: 78255 - DNA, 25 bp, Homo sapiens
agggtagggtaacttcttatggctc

SEQ ID NO: 78256 - DNA, 25 bp, Homo sapiens
gtgctggccagaaagaaatcatttg

SEQ ID NO: 78257 - DNA, 25 bp, Homo sapiens
ggacctcatgggaataacagctaca

SEQ ID NO: 78258 - DNA, 25 bp, Homo sapiens
cccgcccactggatagttttgcaga

SEQ ID NO: 78259 - DNA, 25 bp, Homo sapiens
ctggatttggggaagctgccttcaa

SEQ ID NO: 78260 - DNA, 25 bp, Homo sapiens
tagttcttacacaattgcggagttc

SEQ ID NO: 78261 - DNA, 25 bp, Homo sapiens
ccttagggtacttaaccacgctgta

SEQ ID NO: 78262 - DNA, 25 bp, Homo sapiens
gacccatgagctctggttattatta

SEQ ID NO: 78263 - DNA, 25 bp, Homo sapiens
ctacctggaaacacgtgagctactc

SEQ ID NO: 78264 - DNA, 25 bp, Homo sapiens
ctgctaggtgctgggatgtaaaatc

SEQ ID NO: 78265 - DNA, 25 bp, Homo sapiens
ttttgtagtacagaggagtcaccca

SEQ ID NO: 78266 - DNA, 25 bp, Homo sapiens
tactgggcactgcagcaagcttggt

SEQ ID NO: 78267 - DNA, 25 bp, Homo sapiens
gggagagctgccttttgatattata

SEQ ID NO: 78268 - DNA, 25 bp, Homo sapiens
tgcctcggtgtccaaaatatgttac

SEQ ID NO: 78269 - DNA, 25 bp, Homo sapiens
ctgtctacgtaatggaagccctgtc

SEQ ID NO: 78270 - DNA, 25 bp, Homo sapiens
atctgtgctgggctgaatagtgtcc

SEQ ID NO: 78271 - DNA, 25 bp, Homo sapiens
ctttgggctttagggcagatccgtt

SEQ ID NO: 78272 - DNA, 25 bp, Homo sapiens
ttcagaggtgcttgagcccagactc

SEQ ID NO: 78273 - DNA, 25 bp, Homo sapiens
cctacctggtttttctatatgcttg

SEQ ID NO: 78274 - DNA, 25 bp, Homo sapiens
tattaattactctttagcatgatga

SEQ ID NO: 78275 - DNA, 25 bp, Homo sapiens
gtgcttgaagcctcagagaattctg

SEQ ID NO: 78276 - DNA, 25 bp, Homo sapiens
tctagctgccttgtgagcattgcta

SEQ ID NO: 78277 - DNA, 25 bp, Homo sapiens
agacctgcttctcccttttctattg

SEQ ID NO: 78278 - DNA, 25 bp, Homo sapiens
ggtctccctgtccaaatggcctgca

SEQ ID NO: 78279 - DNA, 25 bp, Homo sapiens
ctaaagtggctctggtctttctacc

SEQ ID NO: 78280 - DNA, 25 bp, Homo sapiens
cccatgatgggaggctctaatatta

SEQ ID NO: 78281 - DNA, 25 bp, Homo sapiens
gttggcctccttgcccagtattgta

SEQ ID NO: 78282 - DNA, 25 bp, Homo sapiens
tgaggctggagcatgaagaatcttg

SEQ ID NO: 78283 - DNA, 25 bp, Homo sapiens
cttccttgggcacctgctgatttta

SEQ ID NO: 78284 - DNA, 25 bp, Homo sapiens
cacctgtgactgcataggatagata

SEQ ID NO: 78285 - DNA, 25 bp, Homo sapiens
tcctttcctgagcttaggtgggaca

SEQ ID NO: 78286 - DNA, 25 bp, Homo sapiens
gtgctgctacaccaccctaattgtc

SEQ ID NO: 78287 - DNA, 25 bp, Homo sapiens
ttcatgggagaggaataacagcttc

SEQ ID NO: 78288 - DNA, 25 bp, Homo sapiens
tggggtcccagctgtgatcacaaca

SEQ ID NO: 78289 - DNA, 25 bp, Homo sapiens
ctgcccagggcaaagagtgtatagc

SEQ ID NO: 78290 - DNA, 25 bp, Homo sapiens
tgcccttagcacacatactggattc

SEQ ID NO: 78291 - DNA, 25 bp, Homo sapiens
cttaatcctcatggggtgcctgttc

SEQ ID NO: 78292 - DNA, 25 bp, Homo sapiens
cactggctatccctggctgcttaga

SEQ ID NO: 78293 - DNA, 25 bp, Homo sapiens
gcagaggctgcgttacaaaaactga

SEQ ID NO: 78294 - DNA, 25 bp, Homo sapiens
ggaaactgcctcacctgtcccttta

SEQ ID NO: 78295 - DNA, 25 bp, Homo sapiens
ggatccgcgccagtttagataatta

SEQ ID NO: 78296 - DNA, 25 bp, Homo sapiens
ccgccgcattcagagcctaaagtta

SEQ ID NO: 78297 - DNA, 25 bp, Homo sapiens
agattcttctagttcccttgggtga

SEQ ID NO: 78298 - DNA, 25 bp, Homo sapiens
gggcttcctagtcaactctcacatc

SEQ ID NO: 78299 - DNA, 25 bp, Homo sapiens
ggcgggagtccaaagagcattctac

SEQ ID NO: 78300 - DNA, 25 bp, Homo sapiens
tagtctctgagttaggccattgttc

SEQ ID NO: 78301 - DNA, 25 bp, Homo sapiens
gcccactggtgaacatggcaaattc

SEQ ID NO: 78302 - DNA, 25 bp, Homo sapiens
cccttggccatctgaggagtaaata

SEQ ID NO: 78303 - DNA, 25 bp, Homo sapiens
cccggggatttgctttcacttttac

SEQ ID NO: 78304 - DNA, 25 bp, Homo sapiens
acttgaatacttttgatgatatgaa

SEQ ID NO: 78305 - DNA, 25 bp, Homo sapiens
ggctcttcctccacccaggtgttaa

SEQ ID NO: 78306 - DNA, 25 bp, Homo sapiens
tgccaggcaagggtgtccacaaaca

SEQ ID NO: 78307 - DNA, 25 bp, Homo sapiens
gaagcaattttttccattaagtcca

SEQ ID NO: 78308 - DNA, 25 bp, Homo sapiens
tgctttctagctggttctttgatac

SEQ ID NO: 78309 - DNA, 25 bp, Homo sapiens
gagacattcgcttgcccaccttttg

SEQ ID NO: 78310 - DNA, 25 bp, Homo sapiens
gcttcatgccaactaggagtcttta

SEQ ID NO: 78311 - DNA, 25 bp, Homo sapiens
cctggtagctccttgccttcaattc

SEQ ID NO: 78312 - DNA, 25 bp, Homo sapiens
caccttggtggtttctgattacatg

SEQ ID NO: 78313 - DNA, 25 bp, Homo sapiens
gagtcttttacctttgccactgaga

SEQ ID NO: 78314 - DNA, 25 bp, Homo sapiens
tctttttcagactccggaggcctcc

SEQ ID NO: 78315 - DNA, 25 bp, Homo sapiens
tggccatatgcccaagacttagttg

SEQ ID NO: 78316 - DNA, 25 bp, Homo sapiens
ctaccaaagttcaggcagtgtcaga

SEQ ID NO: 78317 - DNA, 25 bp, Homo sapiens
gtggggccctgaagtcaattctctc

SEQ ID NO: 78318 - DNA, 25 bp, Homo sapiens
aggagccctaggttccagtcctttt

SEQ ID NO: 78319 - DNA, 25 bp, Homo sapiens
gtcccagctctgatccagtggcttc

SEQ ID NO: 78320 - DNA, 25 bp, Homo sapiens
gagctgcccttaaatcctattggta

SEQ ID NO: 78321 - DNA, 25 bp, Homo sapiens
ccagtgatgctttgctaggacaata

SEQ ID NO: 78322 - DNA, 25 bp, Homo sapiens
ttacagatctagaataaacacatta

SEQ ID NO: 78323 - DNA, 25 bp, Homo sapiens
ggcttttgagtctagatccatctga

SEQ ID NO: 78324 - DNA, 25 bp, Homo sapiens
agtgatctgatgctaagtatggcta

SEQ ID NO: 78325 - DNA, 25 bp, Homo sapiens
agtctgccacattgagctcctaagg

SEQ ID NO: 78326 - DNA, 25 bp, Homo sapiens
tttgggctcaactgatcaagctgca

SEQ ID NO: 78327 - DNA, 25 bp, Homo sapiens
ctctggtcctacactggggctatta

SEQ ID NO: 78328 - DNA, 25 bp, Homo sapiens
ctggccaggggcaatttatttaaga

SEQ ID NO: 78329 - DNA, 25 bp, Homo sapiens
tctcgggcatgcataacacatttta

SEQ ID NO: 78330 - DNA, 25 bp, Homo sapiens
ccctgcctctgtaatggtttcccta

SEQ ID NO: 78331 - DNA, 25 bp, Homo sapiens
tgatggcaggcctcagcttattctc

SEQ ID NO: 78332 - DNA, 25 bp, Homo sapiens
ggggactctagctctcacctgtaca

SEQ ID NO: 78333 - DNA, 25 bp, Homo sapiens
ggcccgtcttgaggctgtaattaaa

SEQ ID NO: 78334 - DNA, 25 bp, Homo sapiens
gcatacaactggctggttctgacta

SEQ ID NO: 78335 - DNA, 25 bp, Homo sapiens
tgcccagcaggtttagcagacagta

SEQ ID NO: 78336 - DNA, 25 bp, Homo sapiens
ttctgggtctggctataagtctgta

SEQ ID NO: 78337 - DNA, 25 bp, Homo sapiens
gaggactccctctgctaactttgta

SEQ ID NO: 78338 - DNA, 25 bp, Homo sapiens
caagtgctcgctggtactctgagta

SEQ ID NO: 78339 - DNA, 25 bp, Homo sapiens
gccttcaaggctacggggtccctaa

SEQ ID NO: 78340 - DNA, 25 bp, Homo sapiens
actggcttgaataactggatatggc

SEQ ID NO: 78341 - DNA, 25 bp, Homo sapiens
ctgagtgctctcctaagacctgatc

SEQ ID NO: 78342 - DNA, 25 bp, Homo sapiens
tgtccctgtcctgactaggtaagtc

SEQ ID NO: 78343 - DNA, 25 bp, Homo sapiens
gccctgggtgaacgacatcttgtca

SEQ ID NO: 78344 - DNA, 25 bp, Homo sapiens
gtaggggtttcttccctctctccaa

SEQ ID NO: 78345 - DNA, 25 bp, Homo sapiens
cccacatgtggttagatgctttcct

SEQ ID NO: 78346 - DNA, 25 bp, Homo sapiens
cccagccagtgccttgcttaaattg

SEQ ID NO: 78347 - DNA, 25 bp, Homo sapiens
gcttagcctggggtagattcttaca

SEQ ID NO: 78348 - DNA, 25 bp, Homo sapiens
ggcgacctgtgatccctaatttgtg

SEQ ID NO: 78349 - DNA, 25 bp, Homo sapiens
cgttgagtcatcgaatgccctggta

SEQ ID NO: 78350 - DNA, 25 bp, Homo sapiens
tgagcacagcctgtcctaccgtata

SEQ ID NO: 78351 - DNA, 25 bp, Homo sapiens
ttgggaagacatttaacgcagccta

SEQ ID NO: 78352 - DNA, 25 bp, Homo sapiens
ctgagcatatacgaaaggacttacc

SEQ ID NO: 78353 - DNA, 25 bp, Homo sapiens
aggctccaggtttgtgaaatctata

SEQ ID NO: 78354 - DNA, 25 bp, Homo sapiens
acctggcaacggaaatgaatgtcta

SEQ ID NO: 78355 - DNA, 25 bp, Homo sapiens
cctccaggagtagcacagtgtttca

SEQ ID NO: 78356 - DNA, 25 bp, Homo sapiens
cctgtgagagctaccatgctgaata

SEQ ID NO: 78357 - DNA, 25 bp, Homo sapiens
ttggcttgcatttcccactgcagta

SEQ ID NO: 78358 - DNA, 25 bp, Homo sapiens
cgagggctacccacaggtcaatata

SEQ ID NO: 78359 - DNA, 25 bp, Homo sapiens
ccaggtatggcagccctttgtttta

SEQ ID NO: 78360 - DNA, 25 bp, Homo sapiens
ggaggaggcactactttttaaattt

SEQ ID NO: 78361 - DNA, 25 bp, Homo sapiens
tccaggctgtgtgccaaaattttgc

SEQ ID NO: 78362 - DNA, 25 bp, Homo sapiens
gcctgctgcttaccttcatggaata

SEQ ID NO: 78363 - DNA, 25 bp, Homo sapiens
cctgggtctcaggaagcagtccatc

SEQ ID NO: 78364 - DNA, 25 bp, Homo sapiens
gggagcattttcctgtgacaccatg

SEQ ID NO: 78365 - DNA, 25 bp, Homo sapiens
gccctgctgatgagaaagccgtgta

SEQ ID NO: 78366 - DNA, 25 bp, Homo sapiens
gtggtgtgcatctctaaatcagtta

SEQ ID NO: 78367 - DNA, 25 bp, Homo sapiens
agcacgcacacacacgggttccaga

SEQ ID NO: 78368 - DNA, 25 bp, Homo sapiens
gggttgatctcctttctatactgaa

SEQ ID NO: 78369 - DNA, 25 bp, Homo sapiens
ccagcttgtctagtgtatgccagtc

SEQ ID NO: 78370 - DNA, 25 bp, Homo sapiens
aactttctggactaggagccctgga

SEQ ID NO: 78371 - DNA, 25 bp, Homo sapiens
agagattgtttttcccctttggtaa

SEQ ID NO: 78372 - DNA, 25 bp, Homo sapiens
cagtagtgcccaaagacctagaggt

SEQ ID NO: 78373 - DNA, 25 bp, Homo sapiens
gggcctcaacgtgcttctcaacatc

SEQ ID NO: 78374 - DNA, 25 bp, Homo sapiens
aggtctatagcagtggccgccattc

SEQ ID NO: 78375 - DNA, 25 bp, Homo sapiens
tgccaggaccaggagtcacatcttg

SEQ ID NO: 78376 - DNA, 25 bp, Homo sapiens
gggacagttctactccatgggactc

SEQ ID NO: 78377 - DNA, 25 bp, Homo sapiens
gtggctctcagctcaaggatttaga

SEQ ID NO: 78378 - DNA, 25 bp, Homo sapiens
tggcagctgctgttaccgttacatc

SEQ ID NO: 78379 - DNA, 25 bp, Homo sapiens
tgctttgcacacagccgaggacgtg

SEQ ID NO: 78380 - DNA, 25 bp, Homo sapiens
gtccaggctggccaaccttgaattg

SEQ ID NO: 78381 - DNA, 25 bp, Homo sapiens
tgtgtctcccactgttccctgtttg

SEQ ID NO: 78382 - DNA, 25 bp, Homo sapiens
tattcctcagcgtggcatcttcagc

SEQ ID NO: 78383 - DNA, 25 bp, Homo sapiens
cacccatctgggagttttaagaacc

SEQ ID NO: 78384 - DNA, 25 bp, Homo sapiens
ggctgtatggacctgcgcccaaatc

SEQ ID NO: 78385 - DNA, 25 bp, Homo sapiens
caccgtcggtctctgctgtaaatgc

SEQ ID NO: 78386 - DNA, 25 bp, Homo sapiens
tcaaccggggtcagcaatactgtcc

SEQ ID NO: 78387 - DNA, 25 bp, Homo sapiens
gccttgtcatgcagagcctggctta

SEQ ID NO: 78388 - DNA, 25 bp, Homo sapiens
gcagacagtttggttcagctcggga

SEQ ID NO: 78389 - DNA, 25 bp, Homo sapiens
gaattccatcagtgtctttgagatt

SEQ ID NO: 78390 - DNA, 25 bp, Homo sapiens
gcgaacggctttccagtccctgaga

SEQ ID NO: 78391 - DNA, 25 bp, Homo sapiens
actcttcttggggagctgacaggca

SEQ ID NO: 78392 - DNA, 25 bp, Homo sapiens
cccagcctcgctttttacaagccac

SEQ ID NO: 78393 - DNA, 25 bp, Homo sapiens
cccgcaatggaagcctgtggtgtgt

SEQ ID NO: 78394 - DNA, 25 bp, Homo sapiens
cgccgctagctcagggagtcttatt

SEQ ID NO: 78395 - DNA, 25 bp, Homo sapiens
aagccgtcctgcagtactccgtgga

SEQ ID NO: 78396 - DNA, 25 bp, Homo sapiens
gggaccacactgcacattgaccatg

SEQ ID NO: 78397 - DNA, 25 bp, Homo sapiens
agaataacttctctgctggctccca

SEQ ID NO: 78398 - DNA, 25 bp, Homo sapiens
ccaggccagcatgttgggtgatccc

SEQ ID NO: 78399 - DNA, 25 bp, Homo sapiens
cccagggactctctgattggacata

SEQ ID NO: 78400 - DNA, 25 bp, Homo sapiens
agctaccgctgtgtggcatccaatg

SEQ ID NO: 78401 - DNA, 25 bp, Homo sapiens
cacggggcctgggatttacaacact

SEQ ID NO: 78402 - DNA, 25 bp, Homo sapiens
gctggagccacactgcccaatggta

SEQ ID NO: 78403 - DNA, 25 bp, Homo sapiens
ccctagagtatgagctcccgcaatg

SEQ ID NO: 78404 - DNA, 25 bp, Homo sapiens
agctctttccctttgctggagtgaa

SEQ ID NO: 78405 - DNA, 25 bp, Homo sapiens
gcgccagctgttgggttagaacctt

SEQ ID NO: 78406 - DNA, 25 bp, Homo sapiens
ccctggtcctgctctgccagtaaga

SEQ ID NO: 78407 - DNA, 25 bp, Homo sapiens
gcgttgagtcatgacccagcccaga

SEQ ID NO: 78408 - DNA, 25 bp, Homo sapiens
cccagctggctcaggaaggaacata

SEQ ID NO: 78409 - DNA, 25 bp, Homo sapiens
tgaggagaaacccacccgtagaata

SEQ ID NO: 78410 - DNA, 25 bp, Homo sapiens
ctctactctgttctgggcactggga

SEQ ID NO: 78411 - DNA, 25 bp, Homo sapiens
ccaggcctggttggaataatcattc

SEQ ID NO: 78412 - DNA, 25 bp, Homo sapiens
tcggcttgggacagaatgctgctca

SEQ ID NO: 78413 - DNA, 25 bp, Homo sapiens
tgcaacgtcacaggtaagggccaca

SEQ ID NO: 78414 - DNA, 25 bp, Homo sapiens
gccctagtcaaagcctgccaaattg

SEQ ID NO: 78415 - DNA, 25 bp, Homo sapiens
ctagggtcagggatctctgctcata

SEQ ID NO: 78416 - DNA, 25 bp, Homo sapiens
ccagggtaagctcagggtttcagca

SEQ ID NO: 78417 - DNA, 25 bp, Homo sapiens
ccatgtgtggcccttctcatcttta

SEQ ID NO: 78418 - DNA, 25 bp, Homo sapiens
gaacacctgctctgggctgctcata

SEQ ID NO: 78419 - DNA, 25 bp, Homo sapiens
gcccttctgggcttcaagatctgta

SEQ ID NO: 78420 - DNA, 25 bp, Homo sapiens
ggctctgacctgctgatcccgatca

SEQ ID NO: 78421 - DNA, 25 bp, Homo sapiens
acatgtcccaggtccactccagagg

SEQ ID NO: 78422 - DNA, 25 bp, Homo sapiens
tggagcccagccaagaatcacctgt

SEQ ID NO: 78423 - DNA, 25 bp, Homo sapiens
gcagtggctgtgagttctgtctcca

SEQ ID NO: 78424 - DNA, 25 bp, Homo sapiens
gggctggtccattcacttgcacgaa

SEQ ID NO: 78425 - DNA, 25 bp, Homo sapiens
tgtattcactgttgaggggcccttc

SEQ ID NO: 78426 - DNA, 25 bp, Homo sapiens
ggaggccacgttacctgcatcttga

SEQ ID NO: 78427 - DNA, 25 bp, Homo sapiens
gccaggcactggttctatttacatt

SEQ ID NO: 78428 - DNA, 25 bp, Homo sapiens
tcccttgtctggtggaaatccgtcc

SEQ ID NO: 78429 - DNA, 25 bp, Homo sapiens
ccatgaggatctgggcaaggagatc

SEQ ID NO: 78430 - DNA, 25 bp, Homo sapiens
ggctccctggtgctaaaaggcctga

SEQ ID NO: 78431 - DNA, 25 bp, Homo sapiens
ctgtccatatgggacgtggagcttc

SEQ ID NO: 78432 - DNA, 25 bp, Homo sapiens
gcggctcagtctctgactcactgta

SEQ ID NO: 78433 - DNA, 25 bp, Homo sapiens
gctgtcccggaaatgtgtgtcaatt

SEQ ID NO: 78434 - DNA, 25 bp, Homo sapiens
tcacgtggcaccgagacggcattgt

SEQ ID NO: 78435 - DNA, 25 bp, Homo sapiens
aggacaggcccaccactcatgaagg

SEQ ID NO: 78436 - DNA, 25 bp, Homo sapiens
tcggggtccagtccttcttagtttc

SEQ ID NO: 78437 - DNA, 25 bp, Homo sapiens
cctaccggtaacgagctggactttg

SEQ ID NO: 78438 - DNA, 25 bp, Homo sapiens
gaggcccacaggctctaccaggtga

SEQ ID NO: 78439 - DNA, 25 bp, Homo sapiens
ccttggccctttgtcactgatgtca

SEQ ID NO: 78440 - DNA, 25 bp, Homo sapiens
gccaaacctgtgattttcaaactct

SEQ ID NO: 78441 - DNA, 25 bp, Homo sapiens
gtcaggttcccatacagtcacatcc

SEQ ID NO: 78442 - DNA, 25 bp, Homo sapiens
ggctccttctgtcccttggtcattc

SEQ ID NO: 78443 - DNA, 25 bp, Homo sapiens
caaggcctctgtcctgcggctttta

SEQ ID NO: 78444 - DNA, 25 bp, Homo sapiens
cggccctgcttgaatgcaccataaa

SEQ ID NO: 78445 - DNA, 25 bp, Homo sapiens
cccaggtgtggaatacccgtgctca

SEQ ID NO: 78446 - DNA, 25 bp, Homo sapiens
tccacgtgaagggtagggcacattc

SEQ ID NO: 78447 - DNA, 25 bp, Homo sapiens
tcctgtcctacaaggggaggctttc

SEQ ID NO: 78448 - DNA, 25 bp, Homo sapiens
gggccttgatctcacccatttggga

SEQ ID NO: 78449 - DNA, 25 bp, Homo sapiens
aggggctggattctctttgcatgtc

SEQ ID NO: 78450 - DNA, 25 bp, Homo sapiens
agaccagccgtcaagatcaccgcga

SEQ ID NO: 78451 - DNA, 25 bp, Homo sapiens
aagactgaactgtcaccactgtcac

SEQ ID NO: 78452 - DNA, 25 bp, Homo sapiens
gggccaaaggcttccactgttctta

SEQ ID NO: 78453 - DNA, 25 bp, Homo sapiens
cagtttctcctgtgtttctgcagct

SEQ ID NO: 78454 - DNA, 25 bp, Homo sapiens
ccattgaatggctacaggcgggtca

SEQ ID NO: 78455 - DNA, 25 bp, Homo sapiens
gggtaccaacctatgcagctctgaa

SEQ ID NO: 78456 - DNA, 25 bp, Homo sapiens
agccacaccgtgctgcgtatctttg

SEQ ID NO: 78457 - DNA, 25 bp, Homo sapiens
gtggccacactcaacaccagcgtga

SEQ ID NO: 78458 - DNA, 25 bp, Homo sapiens
ggccagctcctgtgaaccttgcaaa

SEQ ID NO: 78459 - DNA, 25 bp, Homo sapiens
gatcagctctaacccggcctctatg

SEQ ID NO: 78460 - DNA, 25 bp, Homo sapiens
ctcaggctgcttgggagttgaaatc

SEQ ID NO: 78461 - DNA, 25 bp, Homo sapiens
gcctttgcttttgctgcccgtctga

SEQ ID NO: 78462 - DNA, 25 bp, Homo sapiens
atatgggcggctacacatgctcacc

SEQ ID NO: 78463 - DNA, 25 bp, Homo sapiens
ctggcagctggcaccttctttgaca

SEQ ID NO: 78464 - DNA, 25 bp, Homo sapiens
agcctgccctgcctagttacgggga

SEQ ID NO: 78465 - DNA, 25 bp, Homo sapiens
gcaggtgtcacccaccgagttcaga

SEQ ID NO: 78466 - DNA, 25 bp, Homo sapiens
ctgctgctggtatagtaagtgcctc

SEQ ID NO: 78467 - DNA, 25 bp, Homo sapiens
gctgctgccctggaaaggtttctcc

SEQ ID NO: 78468 - DNA, 25 bp, Homo sapiens
gcgtcagcgagaccttgggtcaaca

SEQ ID NO: 78469 - DNA, 25 bp, Homo sapiens
tgcaaagacagcaacagccggtggc

SEQ ID NO: 78470 - DNA, 25 bp, Homo sapiens
gtcatagactcttacagcgggcttc

SEQ ID NO: 78471 - DNA, 25 bp, Homo sapiens
catatctgcgtgttggcctatctcc

SEQ ID NO: 78472 - DNA, 25 bp, Homo sapiens
ctctttgtgcaacgccaggggtcaa

SEQ ID NO: 78473 - DNA, 25 bp, Homo sapiens
ccagagccagagagtattttccatc

SEQ ID NO: 78474 - DNA, 25 bp, Homo sapiens
agccctctgctctgtgccagtatca

SEQ ID NO: 78475 - DNA, 25 bp, Homo sapiens
cagacatctaaaccaggatggatct

SEQ ID NO: 78476 - DNA, 25 bp, Homo sapiens
agtgtctcagatcccagtgcctttg

SEQ ID NO: 78477 - DNA, 25 bp, Homo sapiens
gggccacatcccaggtttaagtgtc

SEQ ID NO: 78478 - DNA, 25 bp, Homo sapiens
tccctgcgccagtggaacttttatc

SEQ ID NO: 78479 - DNA, 25 bp, Homo sapiens
gcagcctcagtttaccctggacaga

SEQ ID NO: 78480 - DNA, 25 bp, Homo sapiens
tgtgcaccatgctgagaagtaattc

SEQ ID NO: 78481 - DNA, 25 bp, Homo sapiens
gtagccgctcttgttgtcattccag

SEQ ID NO: 78482 - DNA, 25 bp, Homo sapiens
cgccaggtccatgcattgcttcaca

SEQ ID NO: 78483 - DNA, 25 bp, Homo sapiens
cttgggccagcatcatcagatcaca

SEQ ID NO: 78484 - DNA, 25 bp, Homo sapiens
gtgggcaccgaccagaaccatcttc

SEQ ID NO: 78485 - DNA, 25 bp, Homo sapiens
cgctcacatttggagacacgatgtc

SEQ ID NO: 78486 - DNA, 25 bp, Homo sapiens
cgaagcctgtcttgaactggaacta

SEQ ID NO: 78487 - DNA, 25 bp, Homo sapiens
caaaagtggcttgtttgccggcata

SEQ ID NO: 78488 - DNA, 25 bp, Homo sapiens
cctgctctcaggtgtgtgaaccctc

SEQ ID NO: 78489 - DNA, 25 bp, Homo sapiens
actccaattgagtctggtgccttga

SEQ ID NO: 78490 - DNA, 25 bp, Homo sapiens
agtcccaattgctttcttttctatg

SEQ ID NO: 78491 - DNA, 25 bp, Homo sapiens
cattcctctggatcggggtttctca

SEQ ID NO: 78492 - DNA, 25 bp, Homo sapiens
tcgcccgcaaacaagtggaaatcgc

SEQ ID NO: 78493 - DNA, 25 bp, Homo sapiens
aggcagtccttgagaaaccagattc

SEQ ID NO: 78494 - DNA, 25 bp, Homo sapiens
gcggccttggtttttactgtcactc

SEQ ID NO: 78495 - DNA, 25 bp, Homo sapiens
tgctggtccagccttcaggcattta

SEQ ID NO: 78496 - DNA, 25 bp, Homo sapiens
aagccgtctttgtgttggggaaaca

SEQ ID NO: 78497 - DNA, 25 bp, Homo sapiens
cgcggccattttctctctggggaca

SEQ ID NO: 78498 - DNA, 25 bp, Homo sapiens
gcacagggttctgggagattccaca

SEQ ID NO: 78499 - DNA, 25 bp, Homo sapiens
gccgctgcaagctgcccaatttttc

SEQ ID NO: 78500 - DNA, 25 bp, Homo sapiens
ggtgtccagtttcgaggtctttgtc

SEQ ID NO: 78501 - DNA, 25 bp, Homo sapiens
ctccctggaggatgcctgaattcta

SEQ ID NO: 78502 - DNA, 25 bp, Homo sapiens
ccctggtctccttgatgatatagaa

SEQ ID NO: 78503 - DNA, 25 bp, Homo sapiens
acaggatggtctcacgttgtctaca

SEQ ID NO: 78504 - DNA, 25 bp, Homo sapiens
ctccctgcaggaggcctctagaatc

SEQ ID NO: 78505 - DNA, 25 bp, Homo sapiens
cccgtggagcatggatgagaacctc

SEQ ID NO: 78506 - DNA, 25 bp, Homo sapiens
gactgggccctcagctctgtttgaa

SEQ ID NO: 78507 - DNA, 25 bp, Homo sapiens
ggcctcctgtctcatgagggcattg

SEQ ID NO: 78508 - DNA, 25 bp, Homo sapiens
cggggcctgtttcatgctttctttc

SEQ ID NO: 78509 - DNA, 25 bp, Homo sapiens
tggccctgagtcacatcgtaccttg

SEQ ID NO: 78510 - DNA, 25 bp, Homo sapiens
ctgcatcagacgagaggcccatttt

SEQ ID NO: 78511 - DNA, 25 bp, Homo sapiens
ctctaggcttgggaggaacatgccc

SEQ ID NO: 78512 - DNA, 25 bp, Homo sapiens
ttctgggcctttcccaagagcttgg

SEQ ID NO: 78513 - DNA, 25 bp, Homo sapiens
ggacccagctcctcggattcaggga

SEQ ID NO: 78514 - DNA, 25 bp, Homo sapiens
gtctcctgcctccaagggatcatta

SEQ ID NO: 78515 - DNA, 25 bp, Homo sapiens
caggtgcctctgtcttctcttagta

SEQ ID NO: 78516 - DNA, 25 bp, Homo sapiens
cgggcttacctttgtctcttaccta

SEQ ID NO: 78517 - DNA, 25 bp, Homo sapiens
actctgccctggtactttgtgtgtg

SEQ ID NO: 78518 - DNA, 25 bp, Homo sapiens
actgcttctcaccttggccctggta

SEQ ID NO: 78519 - DNA, 25 bp, Homo sapiens
ggcactggcctcattttcctgggga

SEQ ID NO: 78520 - DNA, 25 bp, Homo sapiens
actgtcatgtttgtgtgcggtcatc

SEQ ID NO: 78521 - DNA, 25 bp, Homo sapiens
ggctttttctctcacgctctggtta

SEQ ID NO: 78522 - DNA, 25 bp, Homo sapiens
cctgcccttttagtgatgtaacgta

SEQ ID NO: 78523 - DNA, 25 bp, Homo sapiens
acagtttgggtttcatgcgtttctc

SEQ ID NO: 78524 - DNA, 25 bp, Homo sapiens
ccgcaggagccagatcttgaccatg

SEQ ID NO: 78525 - DNA, 25 bp, Homo sapiens
tcccagggacagacaggtgcttaaa

SEQ ID NO: 78526 - DNA, 25 bp, Homo sapiens
agcccttgtggtctcggcacagata

SEQ ID NO: 78527 - DNA, 25 bp, Homo sapiens
gctggcacagagcatcatgttcaaa

SEQ ID NO: 78528 - DNA, 25 bp, Homo sapiens
ctcactgattccaaggggtgggctc

SEQ ID NO: 78529 - DNA, 25 bp, Homo sapiens
acttgggcacagagcctatcttttg

SEQ ID NO: 78530 - DNA, 25 bp, Homo sapiens
cacaactggaaccatgagatttctc

SEQ ID NO: 78531 - DNA, 25 bp, Homo sapiens
tcttggaactcccagcagcctcgtg

SEQ ID NO: 78532 - DNA, 25 bp, Homo sapiens
agtccacgtgccctaagtgcttagc

SEQ ID NO: 78533 - DNA, 25 bp, Homo sapiens
gccaccgggttcatcaacatcaatt

SEQ ID NO: 78534 - DNA, 25 bp, Homo sapiens
tcctgcgccctctgtttgtatttta

SEQ ID NO: 78535 - DNA, 25 bp, Homo sapiens
agcccggaacttggcagcatttctc

SEQ ID NO: 78536 - DNA, 25 bp, Homo sapiens
cctgtgtccatgagggtttctcgca

SEQ ID NO: 78537 - DNA, 25 bp, Homo sapiens
tttaaccatagtgataagctgcatc

SEQ ID NO: 78538 - DNA, 25 bp, Homo sapiens
tctgccttttgttgaatttatcttt

SEQ ID NO: 78539 - DNA, 25 bp, Homo sapiens
cattattgtggttaatttttttgca

SEQ ID NO: 78540 - DNA, 25 bp, Homo sapiens
cagcaagttgagattctgccagtgc

SEQ ID NO: 78541 - DNA, 25 bp, Homo sapiens
tttgtatttttcatagagacatgaa

SEQ ID NO: 78542 - DNA, 25 bp, Homo sapiens
gggcctgccctcattcacttctttg

SEQ ID NO: 78543 - DNA, 25 bp, Homo sapiens
tcgtttacaggcatgtcaggtagtc

SEQ ID NO: 78544 - DNA, 25 bp, Homo sapiens
gcgggagaaagatggccaatgttaa

SEQ ID NO: 78545 - DNA, 25 bp, Homo sapiens
acccagggttggggaggggaggtga

SEQ ID NO: 78546 - DNA, 25 bp, Homo sapiens
tgctgtgcttgagatggcaaaaccc

SEQ ID NO: 78547 - DNA, 25 bp, Homo sapiens
tcgtctggggtcagtgcaatccata

SEQ ID NO: 78548 - DNA, 25 bp, Homo sapiens
ggagccctcccagcagttagcagta

SEQ ID NO: 78549 - DNA, 25 bp, Homo sapiens
tctgcgtgtttagccaggaccaact

SEQ ID NO: 78550 - DNA, 25 bp, Homo sapiens
cctgcctaaggttggggaatctgct

SEQ ID NO: 78551 - DNA, 25 bp, Homo sapiens
cccaggagtcctgctgtcagagatc

SEQ ID NO: 78552 - DNA, 25 bp, Homo sapiens
tgggtccacccatctgccaatgctg

SEQ ID NO: 78553 - DNA, 25 bp, Homo sapiens
tgggccaccagtcatgcctgttgta

SEQ ID NO: 78554 - DNA, 25 bp, Homo sapiens
ggaggcaggtccaccctcagattta

SEQ ID NO: 78555 - DNA, 25 bp, Homo sapiens
cccgccttcaagcaggggccataga

SEQ ID NO: 78556 - DNA, 25 bp, Homo sapiens
ttacatgtgatgaaaagccctggga

SEQ ID NO: 78557 - DNA, 25 bp, Homo sapiens
tcactccgggaggttctaaacacca

SEQ ID NO: 78558 - DNA, 25 bp, Homo sapiens
tccttagagttcgtctgggaatggc

SEQ ID NO: 78559 - DNA, 25 bp, Homo sapiens
gcgcggtccctggtatttttagtgg

SEQ ID NO: 78560 - DNA, 25 bp, Homo sapiens
ggttttccatcctagaccagaactg

SEQ ID NO: 78561 - DNA, 25 bp, Homo sapiens
cgctctgcagagcacacaggtactg

SEQ ID NO: 78562 - DNA, 25 bp, Homo sapiens
tgacgctggtctctgtttacgcaca

SEQ ID NO: 78563 - DNA, 25 bp, Homo sapiens
tagccgtttgcttggtggtcaccca

SEQ ID NO: 78564 - DNA, 25 bp, Homo sapiens
ttacatgtgctgtggcttcggccca

SEQ ID NO: 78565 - DNA, 25 bp, Homo sapiens
ctaagccacggtgttcacagcagtg

SEQ ID NO: 78566 - DNA, 25 bp, Homo sapiens
gtttggggaaaagtacatgtcagcc

SEQ ID NO: 78567 - DNA, 25 bp, Homo sapiens
cggcgcagactccttggtaaacatc

SEQ ID NO: 78568 - DNA, 25 bp, Homo sapiens
gcagcttaatccctcctttgtgatg

SEQ ID NO: 78569 - DNA, 25 bp, Homo sapiens
ccaagtgtgcctggaagtcatgatc

SEQ ID NO: 78570 - DNA, 25 bp, Homo sapiens
gccaagttctcctctaacctgggga

SEQ ID NO: 78571 - DNA, 25 bp, Homo sapiens
cagggacgctgtttttgcatctgta

SEQ ID NO: 78572 - DNA, 25 bp, Homo sapiens
tgacagctatcataacaccacaata

SEQ ID NO: 78573 - DNA, 25 bp, Homo sapiens
ctagagccaagatgtttcagcagac

SEQ ID NO: 78574 - DNA, 25 bp, Homo sapiens
gtgcctaaagcctgcagatcctcca

SEQ ID NO: 78575 - DNA, 25 bp, Homo sapiens
gtcgccctgagagctttgccatcta

SEQ ID NO: 78576 - DNA, 25 bp, Homo sapiens
cgcttcctcctcctgtgaattagta

SEQ ID NO: 78577 - DNA, 25 bp, Homo sapiens
cgggttcagacccaagacgtgtcca

SEQ ID NO: 78578 - DNA, 25 bp, Homo sapiens
cggggctccaaagctctgtagatta

SEQ ID NO: 78579 - DNA, 25 bp, Homo sapiens
accttgggcaggtcattgctgtctc

SEQ ID NO: 78580 - DNA, 25 bp, Homo sapiens
tgtcagtcttcacgtgggttttccc

SEQ ID NO: 78581 - DNA, 25 bp, Homo sapiens
cagctgatttgccatgtgccagaca

SEQ ID NO: 78582 - DNA, 25 bp, Homo sapiens
tccacgtcagtgtttctcaggtttc

SEQ ID NO: 78583 - DNA, 25 bp, Homo sapiens
tgctgcctgcctaaactgggccttg

SEQ ID NO: 78584 - DNA, 25 bp, Homo sapiens
ggtaccttctttcctgccctttcgg

SEQ ID NO: 78585 - DNA, 25 bp, Homo sapiens
gatgccatcatgtcttctccaggga

SEQ ID NO: 78586 - DNA, 25 bp, Homo sapiens
tttgctcccagctaacgtccactga

SEQ ID NO: 78587 - DNA, 25 bp, Homo sapiens
cgctccgaggaatgcacgtttgatc

SEQ ID NO: 78588 - DNA, 25 bp, Homo sapiens
accgagtttggtacctagtgggaca

SEQ ID NO: 78589 - DNA, 25 bp, Homo sapiens
cttgctttggttgataacgggcatc

SEQ ID NO: 78590 - DNA, 25 bp, Homo sapiens
tgcgtcagcctcactcctgatgttg

SEQ ID NO: 78591 - DNA, 25 bp, Homo sapiens
ggccaacatcactcatggagcattg

SEQ ID NO: 78592 - DNA, 25 bp, Homo sapiens
gctccttgggtacacactatctctt

SEQ ID NO: 78593 - DNA, 25 bp, Homo sapiens
ttctgcagtgattctagactctcat

SEQ ID NO: 78594 - DNA, 25 bp, Homo sapiens
tccaggtggcacagccgcatattta

SEQ ID NO: 78595 - DNA, 25 bp, Homo sapiens
ttctagttccttctaaatgcctgtc

SEQ ID NO: 78596 - DNA, 25 bp, Homo sapiens
atggggtcctcctgagcccagaaga

SEQ ID NO: 78597 - DNA, 25 bp, Homo sapiens
gcgctccaagctcagaggcccatga

SEQ ID NO: 78598 - DNA, 25 bp, Homo sapiens
tcaggccgcttctgcacaggtaaga

SEQ ID NO: 78599 - DNA, 25 bp, Homo sapiens
accagcggttcagctatgggcagcc

SEQ ID NO: 78600 - DNA, 25 bp, Homo sapiens
ggggccaagccatcacacatcattg

SEQ ID NO: 78601 - DNA, 25 bp, Homo sapiens
tgggaggcctctctctaaacctttc

SEQ ID NO: 78602 - DNA, 25 bp, Homo sapiens
aagatgttcactttccttgcaggta

SEQ ID NO: 78603 - DNA, 25 bp, Homo sapiens
cgtgggcctggtccatatgtgaaca

SEQ ID NO: 78604 - DNA, 25 bp, Homo sapiens
gccatagctaactgggaatgcctta

SEQ ID NO: 78605 - DNA, 25 bp, Homo sapiens
ggctgctgggcatttttcttcctga

SEQ ID NO: 78606 - DNA, 25 bp, Homo sapiens
agggcactctgtcttcttgtgtcca

SEQ ID NO: 78607 - DNA, 25 bp, Homo sapiens
gggatctgtgtctgcagccaccata

SEQ ID NO: 78608 - DNA, 25 bp, Homo sapiens
cccttgttcccaggctccttgtatt

SEQ ID NO: 78609 - DNA, 25 bp, Homo sapiens
tgtgctttcactgggactgttctga

SEQ ID NO: 78610 - DNA, 25 bp, Homo sapiens
cagaccgatgacttttgaggacaca

SEQ ID NO: 78611 - DNA, 25 bp, Homo sapiens
ggcagcattcttgtcacctccaggg

SEQ ID NO: 78612 - DNA, 25 bp, Homo sapiens
cgggaatgtggacctcaatgctgta

SEQ ID NO: 78613 - DNA, 25 bp, Homo sapiens
gagggacgcttgctctgcttcacac

SEQ ID NO: 78614 - DNA, 25 bp, Homo sapiens
cctgggctgtccctctaaggatata

SEQ ID NO: 78615 - DNA, 25 bp, Homo sapiens
cagctgggtttcttcggcttctcca

SEQ ID NO: 78616 - DNA, 25 bp, Homo sapiens
ccgggcaccaggaactgcctgctta

SEQ ID NO: 78617 - DNA, 25 bp, Homo sapiens
ggacctgtgcctgccacttcactta

SEQ ID NO: 78618 - DNA, 25 bp, Homo sapiens
ggggctgggctcattcatttattca

SEQ ID NO: 78619 - DNA, 25 bp, Homo sapiens
agctgccattctcgcgtctctggta

SEQ ID NO: 78620 - DNA, 25 bp, Homo sapiens
gcatctgccggctttctctttgtga

SEQ ID NO: 78621 - DNA, 25 bp, Homo sapiens
ttctcctttagctacgctccaggga

SEQ ID NO: 78622 - DNA, 25 bp, Homo sapiens
tacctgtctttgtggctgtcctctg

SEQ ID NO: 78623 - DNA, 25 bp, Homo sapiens
cccatcctagctgattggttataga

SEQ ID NO: 78624 - DNA, 25 bp, Homo sapiens
ggggcctcttcctccttacagtgac

SEQ ID NO: 78625 - DNA, 25 bp, Homo sapiens
atcagctaggctcaccaggttttca

SEQ ID NO: 78626 - DNA, 25 bp, Homo sapiens
gcggccactttccaaggcagctgta

SEQ ID NO: 78627 - DNA, 25 bp, Homo sapiens
ggcagtactagtggctcctcaaact

SEQ ID NO: 78628 - DNA, 25 bp, Homo sapiens
tccgggcttttgtggacaggtatct

SEQ ID NO: 78629 - DNA, 25 bp, Homo sapiens
tgtggctccttatccaacgggctgg

SEQ ID NO: 78630 - DNA, 25 bp, Homo sapiens
caaggagcaaagcaggtctaatttc

SEQ ID NO: 78631 - DNA, 25 bp, Homo sapiens
ctcttggttttccatggtaaggatc

SEQ ID NO: 78632 - DNA, 25 bp, Homo sapiens
gggtctgctggctttcctgcctaaa

SEQ ID NO: 78633 - DNA, 25 bp, Homo sapiens
tctgctgctggttctgttgctcaca

SEQ ID NO: 78634 - DNA, 25 bp, Homo sapiens
ggggcacacagaaaactcaccattg

SEQ ID NO: 78635 - DNA, 25 bp, Homo sapiens
aggtagccactagtcgacacctaag

SEQ ID NO: 78636 - DNA, 25 bp, Homo sapiens
ccacccaggaggatgttctagagtc

SEQ ID NO: 78637 - DNA, 25 bp, Homo sapiens
gagctggctgccctctgtttcacag

SEQ ID NO: 78638 - DNA, 25 bp, Homo sapiens
aggccctcagctgacctctggttca

SEQ ID NO: 78639 - DNA, 25 bp, Homo sapiens
ggggtcctttcccagcacagatgtc

SEQ ID NO: 78640 - DNA, 25 bp, Homo sapiens
ggcccagcactttcttaccgttaga

SEQ ID NO: 78641 - DNA, 25 bp, Homo sapiens
ctggtccctgctgtgatgtcttaga

SEQ ID NO: 78642 - DNA, 25 bp, Homo sapiens
tgtctcatcgattaggccagtagta

SEQ ID NO: 78643 - DNA, 25 bp, Homo sapiens
caggccaggcacttgtgagagcatc

SEQ ID NO: 78644 - DNA, 25 bp, Homo sapiens
ggcggtttccagagctgttcccaca

SEQ ID NO: 78645 - DNA, 25 bp, Homo sapiens
acgtcggccttcatctccggcaaga

SEQ ID NO: 78646 - DNA, 25 bp, Homo sapiens
gcctctgtcttcttcctgttctgtg

SEQ ID NO: 78647 - DNA, 25 bp, Homo sapiens
tccagccagtgagtgggcacccaat

SEQ ID NO: 78648 - DNA, 25 bp, Homo sapiens
caaggtctcttcctaggctgcgtca

SEQ ID NO: 78649 - DNA, 25 bp, Homo sapiens
gccaattttaaaaaaataaagtatg

SEQ ID NO: 78650 - DNA, 25 bp, Homo sapiens
ggtgacctcacactggctgagctta

SEQ ID NO: 78651 - DNA, 25 bp, Homo sapiens
gggcactcacgctcatttctatggg

SEQ ID NO: 78652 - DNA, 25 bp, Homo sapiens
ggccagtctcaattgcacagggatc

SEQ ID NO: 78653 - DNA, 25 bp, Homo sapiens
ctgggtgactctgtggacatcttca

SEQ ID NO: 78654 - DNA, 25 bp, Homo sapiens
gaggcccttggtagctgtagtaaaa

SEQ ID NO: 78655 - DNA, 25 bp, Homo sapiens
cccaactctgttgagggcatttcca

SEQ ID NO: 78656 - DNA, 25 bp, Homo sapiens
tgcggtcttgtcctgtcaccaacta

SEQ ID NO: 78657 - DNA, 25 bp, Homo sapiens
cagccctgagagagggagctccttc

SEQ ID NO: 78658 - DNA, 25 bp, Homo sapiens
tgcctgcctgatccactttgctgag

SEQ ID NO: 78659 - DNA, 25 bp, Homo sapiens
tcagtacgttttcgggaagcccttc

SEQ ID NO: 78660 - DNA, 25 bp, Homo sapiens
ttagcgtcccatgagccttggtatc

SEQ ID NO: 78661 - DNA, 25 bp, Homo sapiens
gtctgggttcgacagcaccaacata

SEQ ID NO: 78662 - DNA, 25 bp, Homo sapiens
cctaggacttttaagcggatgtttc

SEQ ID NO: 78663 - DNA, 25 bp, Homo sapiens
tagttctcctgctcctgcagtcggc

SEQ ID NO: 78664 - DNA, 25 bp, Homo sapiens
actgcagtgaatatcctggagcaca

SEQ ID NO: 78665 - DNA, 25 bp, Homo sapiens
ctctgtcccagaagtcacgtgcttg

SEQ ID NO: 78666 - DNA, 25 bp, Homo sapiens
agctgctgcctcctattcctgtgca

SEQ ID NO: 78667 - DNA, 25 bp, Homo sapiens
gggcttcgtccctgtcattgatgga

SEQ ID NO: 78668 - DNA, 25 bp, Homo sapiens
cccactggagagttcttgagctacc

SEQ ID NO: 78669 - DNA, 25 bp, Homo sapiens
ccagtacatctttggggagcccttt

SEQ ID NO: 78670 - DNA, 25 bp, Homo sapiens
gtggacctcagttacccttacagca

SEQ ID NO: 78671 - DNA, 25 bp, Homo sapiens
ccgacaagtcctgtggcctcatgca

SEQ ID NO: 78672 - DNA, 25 bp, Homo sapiens
acctctgggctgcacccgccatccc

SEQ ID NO: 78673 - DNA, 25 bp, Homo sapiens
ggctcttgccattacagactccaga

SEQ ID NO: 78674 - DNA, 25 bp, Homo sapiens
tgcccgtgcactggctaacactctt

SEQ ID NO: 78675 - DNA, 25 bp, Homo sapiens
acaaatgttacttttaaagacagct

SEQ ID NO: 78676 - DNA, 25 bp, Homo sapiens
agtcagctagtcctctggttccaga

SEQ ID NO: 78677 - DNA, 25 bp, Homo sapiens
tggcacccggcaagcacttcctttt

SEQ ID NO: 78678 - DNA, 25 bp, Homo sapiens
cttgcggattacagccggagcctta

SEQ ID NO: 78679 - DNA, 25 bp, Homo sapiens
gccggcttaccaggatgctcttgta

SEQ ID NO: 78680 - DNA, 25 bp, Homo sapiens
gctccagctcgcacgacaggttgta

SEQ ID NO: 78681 - DNA, 25 bp, Homo sapiens
gcactctcggaggacaatggactga

SEQ ID NO: 78682 - DNA, 25 bp, Homo sapiens
ttcatctccagggtggcaaacttgg

SEQ ID NO: 78683 - DNA, 25 bp, Homo sapiens
ctgaggcctcgtgaatccattagtc

SEQ ID NO: 78684 - DNA, 25 bp, Homo sapiens
cattcccgtttccactgagcagcta

SEQ ID NO: 78685 - DNA, 25 bp, Homo sapiens
tggtagggcaccaccttcttgaaca

SEQ ID NO: 78686 - DNA, 25 bp, Homo sapiens
ggagccgattctagtcccacagctg

SEQ ID NO: 78687 - DNA, 25 bp, Homo sapiens
tggcggctcctcaacttgtagctca

SEQ ID NO: 78688 - DNA, 25 bp, Homo sapiens
ggagggctcatgctcaccttttgaa

SEQ ID NO: 78689 - DNA, 25 bp, Homo sapiens
tgacaccttcaggtccgttgttagc

SEQ ID NO: 78690 - DNA, 25 bp, Homo sapiens
ctgcgtggagctctgtgaagacaac

SEQ ID NO: 78691 - DNA, 25 bp, Homo sapiens
agctaagaggtactggcctggccca

SEQ ID NO: 78692 - DNA, 25 bp, Homo sapiens
agccctgcttggtgtcatgtgatcc

SEQ ID NO: 78693 - DNA, 25 bp, Homo sapiens
ctttccttggaaaccgtagctagtg

SEQ ID NO: 78694 - DNA, 25 bp, Homo sapiens
cacactcctgatcctgggcatggca

SEQ ID NO: 78695 - DNA, 25 bp, Homo sapiens
ccctcggttgagatggacaaaagtc

SEQ ID NO: 78696 - DNA, 25 bp, Homo sapiens
ccctggggattaaaccgaagacctg

SEQ ID NO: 78697 - DNA, 25 bp, Homo sapiens
cccttgggcccttggtaaatggtca

SEQ ID NO: 78698 - DNA, 25 bp, Homo sapiens
ttggcactctttccagttaagcaga

SEQ ID NO: 78699 - DNA, 25 bp, Homo sapiens
acatgcgctgcaccatggaaggctc

SEQ ID NO: 78700 - DNA, 25 bp, Homo sapiens
ggcctcagccttcagtcttcatgga

SEQ ID NO: 78701 - DNA, 25 bp, Homo sapiens
ccacccgttttatagcccagaagga

SEQ ID NO: 78702 - DNA, 25 bp, Homo sapiens
tgtgttgcccaatgccctcagatcg

SEQ ID NO: 78703 - DNA, 25 bp, Homo sapiens
cacaggggtcactgatggcatcttc

SEQ ID NO: 78704 - DNA, 25 bp, Homo sapiens
ggctgaatctctgtggtccctcttc

SEQ ID NO: 78705 - DNA, 25 bp, Homo sapiens
ggccctgctgtcatcccttggaaat

SEQ ID NO: 78706 - DNA, 25 bp, Homo sapiens
ttgccctggaaactcacctcggtgg

SEQ ID NO: 78707 - DNA, 25 bp, Homo sapiens
ccactcacttgttctggaaggcttc

SEQ ID NO: 78708 - DNA, 25 bp, Homo sapiens
ctgtccagctgctctgcaaagcttg

SEQ ID NO: 78709 - DNA, 25 bp, Homo sapiens
ttcaggtgccaaagggttacatgcc

SEQ ID NO: 78710 - DNA, 25 bp, Homo sapiens
ccctgctggtgtgtttgtgagctaa

SEQ ID NO: 78711 - DNA, 25 bp, Homo sapiens
gcgaagctgtttactcggcaccaca

SEQ ID NO: 78712 - DNA, 25 bp, Homo sapiens
cactgccatgccaatgcgggtatca

SEQ ID NO: 78713 - DNA, 25 bp, Homo sapiens
ggcccggggcacaactatattcaca

SEQ ID NO: 78714 - DNA, 25 bp, Homo sapiens
gctcgatgggccagactctaaaata

SEQ ID NO: 78715 - DNA, 25 bp, Homo sapiens
gcctcacctgggatgcctgacaaag

SEQ ID NO: 78716 - DNA, 25 bp, Homo sapiens
cctgaagaacggcaagcggctattt

SEQ ID NO: 78717 - DNA, 25 bp, Homo sapiens
ggagccctttctggaccctaaccta

SEQ ID NO: 78718 - DNA, 25 bp, Homo sapiens
agggcagggctttcttacaccctca

SEQ ID NO: 78719 - DNA, 25 bp, Homo sapiens
cccggagccttcctgcaggcaagta

SEQ ID NO: 78720 - DNA, 25 bp, Homo sapiens
ccagccaggtgtacagaggccagta

SEQ ID NO: 78721 - DNA, 25 bp, Homo sapiens
tgacaccacggtctgcaaaccatgg

SEQ ID NO: 78722 - DNA, 25 bp, Homo sapiens
caaggggcacttccaggtactcaca

SEQ ID NO: 78723 - DNA, 25 bp, Homo sapiens
ccgttatgtttagaatcaggcctga

SEQ ID NO: 78724 - DNA, 25 bp, Homo sapiens
tcccgcctctgagcagctaacattg

SEQ ID NO: 78725 - DNA, 25 bp, Homo sapiens
cccaggatcttagaggctgtcattc

SEQ ID NO: 78726 - DNA, 25 bp, Homo sapiens
gcgcgccggcgtcaccaaatataca

SEQ ID NO: 78727 - DNA, 25 bp, Homo sapiens
actgcaggccactcagctgtaagtg

SEQ ID NO: 78728 - DNA, 25 bp, Homo sapiens
cccgttccagtatgaccagagtcta

SEQ ID NO: 78729 - DNA, 25 bp, Homo sapiens
agggcgccttcacaccagggtatta

SEQ ID NO: 78730 - DNA, 25 bp, Homo sapiens
gcacccggtacccacgcatgaagaa

SEQ ID NO: 78731 - DNA, 25 bp, Homo sapiens
ctggtctggtctcttcccaactata

SEQ ID NO: 78732 - DNA, 25 bp, Homo sapiens
agtggcttctccctcttgtagtgca

SEQ ID NO: 78733 - DNA, 25 bp, Homo sapiens
cctcgggtgagctaagagctaatta

SEQ ID NO: 78734 - DNA, 25 bp, Homo sapiens
caggcagcctccatggtcagtttca

SEQ ID NO: 78735 - DNA, 25 bp, Homo sapiens
gtggctgaagcctccttgaactctt

SEQ ID NO: 78736 - DNA, 25 bp, Homo sapiens
tccagctgcagtgaagagttacata

SEQ ID NO: 78737 - DNA, 25 bp, Homo sapiens
cctccggccactaagggaacatatc

SEQ ID NO: 78738 - DNA, 25 bp, Homo sapiens
gcaggtctcccacagtgcattagga

SEQ ID NO: 78739 - DNA, 25 bp, Homo sapiens
gcacctgagcctgggcacttgtaga

SEQ ID NO: 78740 - DNA, 25 bp, Homo sapiens
gaacggctgtaaaacgctgggcgca

SEQ ID NO: 78741 - DNA, 25 bp, Homo sapiens
ccagtgcatggggtagaaagttttc

SEQ ID NO: 78742 - DNA, 25 bp, Homo sapiens
gggcatctttctcatccgggagtta

SEQ ID NO: 78743 - DNA, 25 bp, Homo sapiens
agatcggcgcttccactgctagctg

SEQ ID NO: 78744 - DNA, 25 bp, Homo sapiens
tgctccagagtgtttcccagaaata

SEQ ID NO: 78745 - DNA, 25 bp, Homo sapiens
tgctggaagccatacctagaccttg

SEQ ID NO: 78746 - DNA, 25 bp, Homo sapiens
agcattggcccacggtctagcatta

SEQ ID NO: 78747 - DNA, 25 bp, Homo sapiens
cactggaccatgagccgagttaatg

SEQ ID NO: 78748 - DNA, 25 bp, Homo sapiens
ctcccaggtgggatagcatcatgta

SEQ ID NO: 78749 - DNA, 25 bp, Homo sapiens
gaccctggcggagtcagatcactta

SEQ ID NO: 78750 - DNA, 25 bp, Homo sapiens
taaaatggccaattcccggtgctca

SEQ ID NO: 78751 - DNA, 25 bp, Homo sapiens
aggttcagacaatataggcagttca

SEQ ID NO: 78752 - DNA, 25 bp, Homo sapiens
accctgggaggtctgattgattaca

SEQ ID NO: 78753 - DNA, 25 bp, Homo sapiens
tcccttagtttcaggtagctctcgc

SEQ ID NO: 78754 - DNA, 25 bp, Homo sapiens
tgggttcagttctacaagtatgagc

SEQ ID NO: 78755 - DNA, 25 bp, Homo sapiens
ttccaaacttttaattcttaccata

SEQ ID NO: 78756 - DNA, 25 bp, Homo sapiens
gtcccggtccctgtaactgttatag

SEQ ID NO: 78757 - DNA, 25 bp, Homo sapiens
ggtcagtcacagtacagtcctcttt

SEQ ID NO: 78758 - DNA, 25 bp, Homo sapiens
tggctttgtccactcccgtctgtaa

SEQ ID NO: 78759 - DNA, 25 bp, Homo sapiens
aacataaaatacaggtaactataaa

SEQ ID NO: 78760 - DNA, 25 bp, Homo sapiens
gctccatgtctggtgctggctccaa

SEQ ID NO: 78761 - DNA, 25 bp, Homo sapiens
tcccagggcacagaaggcaattatg

SEQ ID NO: 78762 - DNA, 25 bp, Homo sapiens
atgaaatgttgccagcccagggagg

SEQ ID NO: 78763 - DNA, 25 bp, Homo sapiens
gggcctggggttcaccatcatattc

SEQ ID NO: 78764 - DNA, 25 bp, Homo sapiens
caggggtctggcattcaccatcata

SEQ ID NO: 78765 - DNA, 25 bp, Homo sapiens
ctagccctggtagcaactgggttta

SEQ ID NO: 78766 - DNA, 25 bp, Homo sapiens
gtggggctccccctaccatgtatta

SEQ ID NO: 78767 - DNA, 25 bp, Homo sapiens
tggaggcaacccagaccgaaacata

SEQ ID NO: 78768 - DNA, 25 bp, Homo sapiens
atcagaaagagactcacgttaaaaa

SEQ ID NO: 78769 - DNA, 25 bp, Homo sapiens
tgttgcactcagaaaattacagaca

SEQ ID NO: 78770 - DNA, 25 bp, Homo sapiens
cggaggcagaagctggttccttata

SEQ ID NO: 78771 - DNA, 25 bp, Homo sapiens
ctgggctcggaaacacgtgctttac

SEQ ID NO: 78772 - DNA, 25 bp, Homo sapiens
tgccaccagccctcggatatatttc

SEQ ID NO: 78773 - DNA, 25 bp, Homo sapiens
gagcctcgcccagcccaagaatgtt

SEQ ID NO: 78774 - DNA, 25 bp, Homo sapiens
tggtgcgccatctccaggatacttg

SEQ ID NO: 78775 - DNA, 25 bp, Homo sapiens
cctttctggaatctgcatggtagca

SEQ ID NO: 78776 - DNA, 25 bp, Homo sapiens
tggcccttgctaggtccaacatctc

SEQ ID NO: 78777 - DNA, 25 bp, Homo sapiens
ggcctcccggttggtatcagaattc

SEQ ID NO: 78778 - DNA, 25 bp, Homo sapiens
ctcggggccacatgaagaaacactc

SEQ ID NO: 78779 - DNA, 25 bp, Homo sapiens
atgcccaggctgtttccctccaagg

SEQ ID NO: 78780 - DNA, 25 bp, Homo sapiens
cctcattgctggcatctggtgaaca

SEQ ID NO: 78781 - DNA, 25 bp, Homo sapiens
ggctggagtctctacatcaacggga

SEQ ID NO: 78782 - DNA, 25 bp, Homo sapiens
cgttcctggtgcacggacgtattca

SEQ ID NO: 78783 - DNA, 25 bp, Homo sapiens
ccacaataagcataaatgcttaaaa

SEQ ID NO: 78784 - DNA, 25 bp, Homo sapiens
atgatgtttgggtaaagaaggattc

SEQ ID NO: 78785 - DNA, 25 bp, Homo sapiens
ctgagctgcgctccattaggacaca

SEQ ID NO: 78786 - DNA, 25 bp, Homo sapiens
acagggctttctcaggtctacaggc

SEQ ID NO: 78787 - DNA, 25 bp, Homo sapiens
ctaggggctttacaccaggagaacc

SEQ ID NO: 78788 - DNA, 25 bp, Homo sapiens
agcagctctcagatggcttccagga

SEQ ID NO: 78789 - DNA, 25 bp, Homo sapiens
acaacctggaaggtgctcaggcctc

SEQ ID NO: 78790 - DNA, 25 bp, Homo sapiens
ccagggctggattttctcaaatgtc

SEQ ID NO: 78791 - DNA, 25 bp, Homo sapiens
ccactctgggacacgtgtgaccttt

SEQ ID NO: 78792 - DNA, 25 bp, Homo sapiens
cggctcgtcagttttctccaggatg

SEQ ID NO: 78793 - DNA, 25 bp, Homo sapiens
tgaggcacctcactggcacagtttg

SEQ ID NO: 78794 - DNA, 25 bp, Homo sapiens
tggatgtaaaccacggccagttctg

SEQ ID NO: 78795 - DNA, 25 bp, Homo sapiens
gccgtcctcagaaagggtgacttta

SEQ ID NO: 78796 - DNA, 25 bp, Homo sapiens
ggaaaccatccagagtgcagcagct

SEQ ID NO: 78797 - DNA, 25 bp, Homo sapiens
cctgctggctgtacaaacatgaatg

SEQ ID NO: 78798 - DNA, 25 bp, Homo sapiens
tctcggtcatgaacacgcacgaatg

SEQ ID NO: 78799 - DNA, 25 bp, Homo sapiens
tgctccctgggtgctgaaatagtca

SEQ ID NO: 78800 - DNA, 25 bp, Homo sapiens
gcccgcctaagtctgtgtgctttta

SEQ ID NO: 78801 - DNA, 25 bp, Homo sapiens
tcccaagccaggtgccacagagatg

SEQ ID NO: 78802 - DNA, 25 bp, Homo sapiens
ctccagggcttgtctgattgatcta

SEQ ID NO: 78803 - DNA, 25 bp, Homo sapiens
tcggggaggctcttcaacttgaacc

SEQ ID NO: 78804 - DNA, 25 bp, Homo sapiens
gcagggcctggcttatgatctatga

SEQ ID NO: 78805 - DNA, 25 bp, Homo sapiens
gctgcttacagcacggcgactccta

SEQ ID NO: 78806 - DNA, 25 bp, Homo sapiens
acagctgcgcatgtgtgtaaaaaca

SEQ ID NO: 78807 - DNA, 25 bp, Homo sapiens
ctgctgcttccaccaggaggtactt

SEQ ID NO: 78808 - DNA, 25 bp, Homo sapiens
gcacctcaagggatggtcactgtta

SEQ ID NO: 78809 - DNA, 25 bp, Homo sapiens
tggcgtcatttcttcacagcggttg

SEQ ID NO: 78810 - DNA, 25 bp, Homo sapiens
gggtgattccagagaccacagagtc

SEQ ID NO: 78811 - DNA, 25 bp, Homo sapiens
tgccagtaggctcccacctgaaata

SEQ ID NO: 78812 - DNA, 25 bp, Homo sapiens
agccgccgcctcattatatttttta

SEQ ID NO: 78813 - DNA, 25 bp, Homo sapiens
cgcgcagctcttggcattgtcttca

SEQ ID NO: 78814 - DNA, 25 bp, Homo sapiens
ttctgcaccacttgcccggggatgt

SEQ ID NO: 78815 - DNA, 25 bp, Homo sapiens
ggctcttccaagacaccgggactgg

SEQ ID NO: 78816 - DNA, 25 bp, Homo sapiens
atccctttgaaatgagcagtacaga

SEQ ID NO: 78817 - DNA, 25 bp, Homo sapiens
cacggctaggcagctacttgtcatc

SEQ ID NO: 78818 - DNA, 25 bp, Homo sapiens
aagatgacactttggggctgccctc

SEQ ID NO: 78819 - DNA, 25 bp, Homo sapiens
caggtctgtgctcgatttgggatta

SEQ ID NO: 78820 - DNA, 25 bp, Homo sapiens
tccctccaggctccggaagagacct

SEQ ID NO: 78821 - DNA, 25 bp, Homo sapiens
ggggcctaggcttcagttactcaca

SEQ ID NO: 78822 - DNA, 25 bp, Homo sapiens
cggccacgtgctccctcattataag

SEQ ID NO: 78823 - DNA, 25 bp, Homo sapiens
ggccacctcactgacttacttcttg

SEQ ID NO: 78824 - DNA, 25 bp, Homo sapiens
cacgggatcacctgcgtttctttca

SEQ ID NO: 78825 - DNA, 25 bp, Homo sapiens
tcagccaaggccaggagaacgtgca

SEQ ID NO: 78826 - DNA, 25 bp, Homo sapiens
ttcggctctgggctcaaaagttacc

SEQ ID NO: 78827 - DNA, 25 bp, Homo sapiens
ccaagtcctctgtgcatgtctgtca

SEQ ID NO: 78828 - DNA, 25 bp, Homo sapiens
ccacagccttgagcacctgacatta

SEQ ID NO: 78829 - DNA, 25 bp, Homo sapiens
agcaccagggacagcttctccagta

SEQ ID NO: 78830 - DNA, 25 bp, Homo sapiens
caaggcaagctctgacggattccca

SEQ ID NO: 78831 - DNA, 25 bp, Homo sapiens
tggcccgaacatgctgccgtcacag

SEQ ID NO: 78832 - DNA, 25 bp, Homo sapiens
gcgcagagacccatccgttgagaca

SEQ ID NO: 78833 - DNA, 25 bp, Homo sapiens
ggggactccgcaagcactcaacaga

SEQ ID NO: 78834 - DNA, 25 bp, Homo sapiens
cgccaggagcgtgcaatgccattca

SEQ ID NO: 78835 - DNA, 25 bp, Homo sapiens
ccctgccacagggaggtcctttata

SEQ ID NO: 78836 - DNA, 25 bp, Homo sapiens
cccagggaattcacagggcctaaga

SEQ ID NO: 78837 - DNA, 25 bp, Homo sapiens
ggcctccagctcttttgaacccaag

SEQ ID NO: 78838 - DNA, 25 bp, Homo sapiens
tcacgggcacgagcctagaacatgc

SEQ ID NO: 78839 - DNA, 25 bp, Homo sapiens
acacggagccttgctgcctgtcaca

SEQ ID NO: 78840 - DNA, 25 bp, Homo sapiens
ccctgctcaaggtgctcagcaagca

SEQ ID NO: 78841 - DNA, 25 bp, Homo sapiens
tcccaggggtcagcaaaaatcaatc

SEQ ID NO: 78842 - DNA, 25 bp, Homo sapiens
ggtgattccacccacagccgcgatg

SEQ ID NO: 78843 - DNA, 25 bp, Homo sapiens
ggcctgccatgacgctatgacccta

SEQ ID NO: 78844 - DNA, 25 bp, Homo sapiens
agttgtctggttctcggccttctta

SEQ ID NO: 78845 - DNA, 25 bp, Homo sapiens
cgcagcgtcagatctaggcaacttt

SEQ ID NO: 78846 - DNA, 25 bp, Homo sapiens
ctgggctgtgtctccttgaacgaaa

SEQ ID NO: 78847 - DNA, 25 bp, Homo sapiens
tgagtccagcgctttctccacaacg

SEQ ID NO: 78848 - DNA, 25 bp, Homo sapiens
aatgtctcttccaaggcccaggagg

SEQ ID NO: 78849 - DNA, 25 bp, Homo sapiens
ggacccattttaggaacatttcatg

SEQ ID NO: 78850 - DNA, 25 bp, Homo sapiens
catggcccagttttaggaacatttc

SEQ ID NO: 78851 - DNA, 25 bp, Homo sapiens
ggctgcagacaggttcccacatttg

SEQ ID NO: 78852 - DNA, 25 bp, Homo sapiens
tctggggttctcaggacacaaagtc

SEQ ID NO: 78853 - DNA, 25 bp, Homo sapiens
ctccagggtcccgtgaaattcaaac

SEQ ID NO: 78854 - DNA, 25 bp, Homo sapiens
gaggggcctaccaaggacatgatgc

SEQ ID NO: 78855 - DNA, 25 bp, Homo sapiens
tgggcccgatcagccggcaatgaaa

SEQ ID NO: 78856 - DNA, 25 bp, Homo sapiens
agctcctcggctgactaactttaag

SEQ ID NO: 78857 - DNA, 25 bp, Homo sapiens
tctggaatctttgaacctaacggcc

SEQ ID NO: 78858 - DNA, 25 bp, Homo sapiens
cgcagagcttgcagactagatggtc

SEQ ID NO: 78859 - DNA, 25 bp, Homo sapiens
tgcgagttcagaccttccagatgga

SEQ ID NO: 78860 - DNA, 25 bp, Homo sapiens
ggggaccggaagcacatttttaata

SEQ ID NO: 78861 - DNA, 25 bp, Homo sapiens
agctcccgctggtgaacttagatca

SEQ ID NO: 78862 - DNA, 25 bp, Homo sapiens
ctgtgctcccaaacaacggctcata

SEQ ID NO: 78863 - DNA, 25 bp, Homo sapiens
agccgctggctatgacttaacatta

SEQ ID NO: 78864 - DNA, 25 bp, Homo sapiens
agcaccggcctgttctccattagtg

SEQ ID NO: 78865 - DNA, 25 bp, Homo sapiens
ggcttggtcccactcgataagaagg

SEQ ID NO: 78866 - DNA, 25 bp, Homo sapiens
ggccaagttctttacctgttcctga

SEQ ID NO: 78867 - DNA, 25 bp, Homo sapiens
ccagctcggctagaaactattttta

SEQ ID NO: 78868 - DNA, 25 bp, Homo sapiens
ctggcacctgagtttcacagcaatc

SEQ ID NO: 78869 - DNA, 25 bp, Homo sapiens
gggctctgcctccagtccacaaagg

SEQ ID NO: 78870 - DNA, 25 bp, Homo sapiens
ggcaggacccaggaattttccagta

SEQ ID NO: 78871 - DNA, 25 bp, Homo sapiens
accacctgagggcagtgtcatcctg

SEQ ID NO: 78872 - DNA, 25 bp, Homo sapiens
tggagcccttggtcccagataagca

SEQ ID NO: 78873 - DNA, 25 bp, Homo sapiens
cccactggggctgatcacatgaata

SEQ ID NO: 78874 - DNA, 25 bp, Homo sapiens
ggattaggtcctgtacttggctcca

SEQ ID NO: 78875 - DNA, 25 bp, Homo sapiens
cctgcgtgccgaagagtccataaac

SEQ ID NO: 78876 - DNA, 25 bp, Homo sapiens
ccttagttcaagagagacgccgata

SEQ ID NO: 78877 - DNA, 25 bp, Homo sapiens
cagcctgggttgactacgaactttc

SEQ ID NO: 78878 - DNA, 25 bp, Homo sapiens
gcacgctctcgctctctttgtgtaa

SEQ ID NO: 78879 - DNA, 25 bp, Homo sapiens
tctgtgtccatctgtgtcctgtgtg

SEQ ID NO: 78880 - DNA, 25 bp, Homo sapiens
tggtcaagcctctggtggactttta

SEQ ID NO: 78881 - DNA, 25 bp, Homo sapiens
atctgccgtggtcaaacgtgggtca

SEQ ID NO: 78882 - DNA, 25 bp, Homo sapiens
ctcggttaaagttgatgatgccctc

SEQ ID NO: 78883 - DNA, 25 bp, Homo sapiens
aaggtgccacacatgcccgaggttt

SEQ ID NO: 78884 - DNA, 25 bp, Homo sapiens
aggctcaggccacgcaatctgcttg

SEQ ID NO: 78885 - DNA, 25 bp, Homo sapiens
accctccaggtgaagcacagagttg

SEQ ID NO: 78886 - DNA, 25 bp, Homo sapiens
gtcctggccatgtctctcacttgtg

SEQ ID NO: 78887 - DNA, 25 bp, Homo sapiens
tagtgcccactctgcaccacacgcg

SEQ ID NO: 78888 - DNA, 25 bp, Homo sapiens
attagtgcccactctgcgccacacg

SEQ ID NO: 78889 - DNA, 25 bp, Homo sapiens
cgccgctggggcataaaattatttt

SEQ ID NO: 78890 - DNA, 25 bp, Homo sapiens
acgtccgagccctttgcaggtatta

SEQ ID NO: 78891 - DNA, 25 bp, Homo sapiens
gagccgccgtcttgccaaaacaatg

SEQ ID NO: 78892 - DNA, 25 bp, Homo sapiens
gtccttctgatcctgggtcctccta

SEQ ID NO: 78893 - DNA, 25 bp, Homo sapiens
tgggaactcctaaacctgggtcatc

SEQ ID NO: 78894 - DNA, 25 bp, Homo sapiens
tgctcagacccgctcttcattagtg

SEQ ID NO: 78895 - DNA, 25 bp, Homo sapiens
tgcctggccctaagttgctgtcttc

SEQ ID NO: 78896 - DNA, 25 bp, Homo sapiens
tgtccctagggtgaagtctagctcc

SEQ ID NO: 78897 - DNA, 25 bp, Homo sapiens
cgctgccctgctgtcttgagagaac

SEQ ID NO: 78898 - DNA, 25 bp, Homo sapiens
gagcctgtttccctgcctatcaata

SEQ ID NO: 78899 - DNA, 25 bp, Homo sapiens
tgggattctctaagcctccaggggc

SEQ ID NO: 78900 - DNA, 25 bp, Homo sapiens
tcctgattcgtgaccctggctaagc

SEQ ID NO: 78901 - DNA, 25 bp, Homo sapiens
ctgggaacacagcagccaactcgtg

SEQ ID NO: 78902 - DNA, 25 bp, Homo sapiens
tgacgaggctgtcaccttctgaatt

SEQ ID NO: 78903 - DNA, 25 bp, Homo sapiens
gggtggaacttgcatcctgaacatt

SEQ ID NO: 78904 - DNA, 25 bp, Homo sapiens
acccagaccgggacgttttcataca

SEQ ID NO: 78905 - DNA, 25 bp, Homo sapiens
cccattgggtattgctgggaccaga

SEQ ID NO: 78906 - DNA, 25 bp, Homo sapiens
cccgtggctcatatggcttaaaaca

SEQ ID NO: 78907 - DNA, 25 bp, Homo sapiens
cagggacccagaccgggactttttc

SEQ ID NO: 78908 - DNA, 25 bp, Homo sapiens
cccgcatgttctagggcaccatatg

SEQ ID NO: 78909 - DNA, 25 bp, Homo sapiens
gcggaagctccacgttgcatttttc

SEQ ID NO: 78910 - DNA, 25 bp, Homo sapiens
cgctccgggatgattccaggttgta

SEQ ID NO: 78911 - DNA, 25 bp, Homo sapiens
tggaggcctcctttctgcatgagtg

SEQ ID NO: 78912 - DNA, 25 bp, Homo sapiens
ggccacgtcgcttcctcttatcaga

SEQ ID NO: 78913 - DNA, 25 bp, Homo sapiens
cgagctccagggttttgtgcaatcc

SEQ ID NO: 78914 - DNA, 25 bp, Homo sapiens
gtgactgtgtactgaccctgacctg

SEQ ID NO: 78915 - DNA, 25 bp, Homo sapiens
aggggctctggcactccagcatttc

SEQ ID NO: 78916 - DNA, 25 bp, Homo sapiens
cctggcccatgtcttctgtgtaatc

SEQ ID NO: 78917 - DNA, 25 bp, Homo sapiens
cattctgtatctcggcgcagaggct

SEQ ID NO: 78918 - DNA, 25 bp, Homo sapiens
ccattccaagagagtggggttgacg

SEQ ID NO: 78919 - DNA, 25 bp, Homo sapiens
gtgttagtatacacagatacatttt

SEQ ID NO: 78920 - DNA, 25 bp, Homo sapiens
gcattgtatttttgaaagtagttta

SEQ ID NO: 78921 - DNA, 25 bp, Homo sapiens
ctagactgtcagctccacgggaaga

SEQ ID NO: 78922 - DNA, 25 bp, Homo sapiens
cccgctgctagcagtctccttagga

SEQ ID NO: 78923 - DNA, 25 bp, Homo sapiens
gggcttatccctgcgttgtgacgaa

SEQ ID NO: 78924 - DNA, 25 bp, Homo sapiens
aggcctcaccctggctgatctgatg

SEQ ID NO: 78925 - DNA, 25 bp, Homo sapiens
gtgccacctctctcactgtagcttg

SEQ ID NO: 78926 - DNA, 25 bp, Homo sapiens
cggctttcctgctggagtccatgag

SEQ ID NO: 78927 - DNA, 25 bp, Homo sapiens
accctatgcactgcattatacttac

SEQ ID NO: 78928 - DNA, 25 bp, Homo sapiens
tctgggccaccgcagatccagggtt

SEQ ID NO: 78929 - DNA, 25 bp, Homo sapiens
tagcggcctccagtttccatacaga

SEQ ID NO: 78930 - DNA, 25 bp, Homo sapiens
ccaggcggtcttaatgcactttaca

SEQ ID NO: 78931 - DNA, 25 bp, Homo sapiens
tgtttccacttagcggcctcccagg

SEQ ID NO: 78932 - DNA, 25 bp, Homo sapiens
ggctgccctggcaccagtgtataca

SEQ ID NO: 78933 - DNA, 25 bp, Homo sapiens
gggtggttttcctatacatgacaga

SEQ ID NO: 78934 - DNA, 25 bp, Homo sapiens
tgctctgccctacccaaggaggatg

SEQ ID NO: 78935 - DNA, 25 bp, Homo sapiens
gagctgccatttgtccctgttagaa

SEQ ID NO: 78936 - DNA, 25 bp, Homo sapiens
ggccgctgctccagaagctcttttt

SEQ ID NO: 78937 - DNA, 25 bp, Homo sapiens
ggcggatatccctctcctgagaata

SEQ ID NO: 78938 - DNA, 25 bp, Homo sapiens
tgggatccggtccacatgcagcttt

SEQ ID NO: 78939 - DNA, 25 bp, Homo sapiens
ggtgacctctttcccttccttgacg

SEQ ID NO: 78940 - DNA, 25 bp, Homo sapiens
acaactctgggctggggaaaattcc

SEQ ID NO: 78941 - DNA, 25 bp, Homo sapiens
tcccttggggataggaggaaccacc

SEQ ID NO: 78942 - DNA, 25 bp, Homo sapiens
ccctggggaaagagtggtctgtttt

SEQ ID NO: 78943 - DNA, 25 bp, Homo sapiens
attttttttaacctttttgctctgt

SEQ ID NO: 78944 - DNA, 25 bp, Homo sapiens
tcatttagatttactcacacattca

SEQ ID NO: 78945 - DNA, 25 bp, Homo sapiens
gcacgtggaggacagcaagttttca

SEQ ID NO: 78946 - DNA, 25 bp, Homo sapiens
gtgggcgttcccagggccctccctg

SEQ ID NO: 78947 - DNA, 25 bp, Homo sapiens
cccggcttgcactcagcatagagca

SEQ ID NO: 78948 - DNA, 25 bp, Homo sapiens
tttccagagcatcaccgtagggttc

SEQ ID NO: 78949 - DNA, 25 bp, Homo sapiens
gctggcttgaacgagctgactccga

SEQ ID NO: 78950 - DNA, 25 bp, Homo sapiens
caggcagctctctttgtgtccagga

SEQ ID NO: 78951 - DNA, 25 bp, Homo sapiens
cagcacggttttggcaccacttctc

SEQ ID NO: 78952 - DNA, 25 bp, Homo sapiens
ggccagctgtcctctgagcacctta

SEQ ID NO: 78953 - DNA, 25 bp, Homo sapiens
gcggccttaggctcaacagtccaga

SEQ ID NO: 78954 - DNA, 25 bp, Homo sapiens
cgagggtcacctcttctccagtaca

SEQ ID NO: 78955 - DNA, 25 bp, Homo sapiens
tgcgctatacagaaccttcacgttt

SEQ ID NO: 78956 - DNA, 25 bp, Homo sapiens
gtggattctccaccctctctgtgca

SEQ ID NO: 78957 - DNA, 25 bp, Homo sapiens
cagatgttctcagctggacagggca

SEQ ID NO: 78958 - DNA, 25 bp, Homo sapiens
ctgggacccttgtctgtctaggacc

SEQ ID NO: 78959 - DNA, 25 bp, Homo sapiens
ggacatggcctcctcttgctgggaa

SEQ ID NO: 78960 - DNA, 25 bp, Homo sapiens
accctctgggtgcacaaggccatta

SEQ ID NO: 78961 - DNA, 25 bp, Homo sapiens
cagtaccttctgtggctggcaccca

SEQ ID NO: 78962 - DNA, 25 bp, Homo sapiens
ctgaggcctctctctgaaggtcatc

SEQ ID NO: 78963 - DNA, 25 bp, Homo sapiens
tcgctgagttttcgggtcttggctc

SEQ ID NO: 78964 - DNA, 25 bp, Homo sapiens
aggaggacttccctttccaagcacg

SEQ ID NO: 78965 - DNA, 25 bp, Homo sapiens
gactgtggcttttcccttttgggca

SEQ ID NO: 78966 - DNA, 25 bp, Homo sapiens
tccggaggcccagcaaacagaaagc

SEQ ID NO: 78967 - DNA, 25 bp, Homo sapiens
gcccaaaggctcagtggtccacaga

SEQ ID NO: 78968 - DNA, 25 bp, Homo sapiens
aggcactgtctactgagctctcacc

SEQ ID NO: 78969 - DNA, 25 bp, Homo sapiens
gccaggttgcttctaggccgtcaca

SEQ ID NO: 78970 - DNA, 25 bp, Homo sapiens
tgggtctggggaggttggagctgtt

SEQ ID NO: 78971 - DNA, 25 bp, Homo sapiens
caatcgtcctggttggctcctgaaa

SEQ ID NO: 78972 - DNA, 25 bp, Homo sapiens
gctgaggcaagtttagtgcccttga

SEQ ID NO: 78973 - DNA, 25 bp, Homo sapiens
agggcggtcttgctgcttttaagtc

SEQ ID NO: 78974 - DNA, 25 bp, Homo sapiens
gagctcagggaagtctgagctagaa

SEQ ID NO: 78975 - DNA, 25 bp, Homo sapiens
aaaaaccgaacaacagcaaccaaaa

SEQ ID NO: 78976 - DNA, 25 bp, Homo sapiens
ccagctctgagaaggggaacaaatg

SEQ ID NO: 78977 - DNA, 25 bp, Homo sapiens
cctgcacacagggttccacggtagc

SEQ ID NO: 78978 - DNA, 25 bp, Homo sapiens
gatccggccctcagcttgaaacagc

SEQ ID NO: 78979 - DNA, 25 bp, Homo sapiens
cgcctccaccgtatgggttctcaga

SEQ ID NO: 78980 - DNA, 25 bp, Homo sapiens
tgcctctgacagcttgaaccaaacg

SEQ ID NO: 78981 - DNA, 25 bp, Homo sapiens
tgacttcggtgatgcccactgtatg

SEQ ID NO: 78982 - DNA, 25 bp, Homo sapiens
ctccttatgggttctgtgggattaa

SEQ ID NO: 78983 - DNA, 25 bp, Homo sapiens
tccacacgtgcactgggcaacttta

SEQ ID NO: 78984 - DNA, 25 bp, Homo sapiens
cacgctgggcaaccgtaagtattta

SEQ ID NO: 78985 - DNA, 25 bp, Homo sapiens
gttagtttctttcagcggcgcagga

SEQ ID NO: 78986 - DNA, 25 bp, Homo sapiens
tccctgttctctgtgggtcatcagc

SEQ ID NO: 78987 - DNA, 25 bp, Homo sapiens
cggcccgccatgctcagaaaattct

SEQ ID NO: 78988 - DNA, 25 bp, Homo sapiens
ctggctccgagcacaggacatttta

SEQ ID NO: 78989 - DNA, 25 bp, Homo sapiens
cgcctgccgagcatctgcatggata

SEQ ID NO: 78990 - DNA, 25 bp, Homo sapiens
ccggggtgcactgaatactgtatca

SEQ ID NO: 78991 - DNA, 25 bp, Homo sapiens
gctgacccgggctgacaatttaggt

SEQ ID NO: 78992 - DNA, 25 bp, Homo sapiens
tggcctctcgcattactcatctgtg

SEQ ID NO: 78993 - DNA, 25 bp, Homo sapiens
ccaggcagagcaatcacgagcaata

SEQ ID NO: 78994 - DNA, 25 bp, Homo sapiens
aggagctccctttcagcctgcagag

SEQ ID NO: 78995 - DNA, 25 bp, Homo sapiens
gtatctgctcctgcgtctggttttg

SEQ ID NO: 78996 - DNA, 25 bp, Homo sapiens
aggggctggtccacatacatgcgta

SEQ ID NO: 78997 - DNA, 25 bp, Homo sapiens
gccctcagatacttgcaggctcatg

SEQ ID NO: 78998 - DNA, 25 bp, Homo sapiens
aggccacctgctgctcggaaacatc

SEQ ID NO: 78999 - DNA, 25 bp, Homo sapiens
gctgtcgccgctcttgattacttca

SEQ ID NO: 79000 - DNA, 25 bp, Homo sapiens
acggctgcagctgacccacatttca

SEQ ID NO: 79001 - DNA, 25 bp, Homo sapiens
gtccctcgtccaaaccctggtgatg

SEQ ID NO: 79002 - DNA, 25 bp, Homo sapiens
gctgacttgaaaactggcgccatga

SEQ ID NO: 79003 - DNA, 25 bp, Homo sapiens
tggctgcccactccagaaagcactg

SEQ ID NO: 79004 - DNA, 25 bp, Homo sapiens
ctcagcctcatgaaggagcagcaca

SEQ ID NO: 79005 - DNA, 25 bp, Homo sapiens
agcgttctagctcttcccgtgcata

SEQ ID NO: 79006 - DNA, 25 bp, Homo sapiens
gaggctctgccaccgttttccaaca

SEQ ID NO: 79007 - DNA, 25 bp, Homo sapiens
cgtgacatgcgtccctaggcacata

SEQ ID NO: 79008 - DNA, 25 bp, Homo sapiens
tctctggaaccagtacacttggcta

SEQ ID NO: 79009 - DNA, 25 bp, Homo sapiens
aggcaccactttcgttttctgagcg

SEQ ID NO: 79010 - DNA, 25 bp, Homo sapiens
atccgtattgactccgtagctgtgc

SEQ ID NO: 79011 - DNA, 25 bp, Homo sapiens
taaccctcttggcatggaaaccaga

SEQ ID NO: 79012 - DNA, 25 bp, Homo sapiens
ctctgctccgaatgcgctctttgga

SEQ ID NO: 79013 - DNA, 25 bp, Homo sapiens
agtaagaagggaaatcggaaagaga

SEQ ID NO: 79014 - DNA, 25 bp, Homo sapiens
ggacacaaaaatcaatgtgtaaatg

SEQ ID NO: 79015 - DNA, 25 bp, Homo sapiens
tccctggctgtgtctgtctggaata

SEQ ID NO: 79016 - DNA, 25 bp, Homo sapiens
cctgggtcctgcacctgcacatata

SEQ ID NO: 79017 - DNA, 25 bp, Homo sapiens
gcccgtccacgatccctggggaaaa

SEQ ID NO: 79018 - DNA, 25 bp, Homo sapiens
gtgcccttcagagacagctcccatg

SEQ ID NO: 79019 - DNA, 25 bp, Homo sapiens
ccctggctggtgtgtataaagtaaa

SEQ ID NO: 79020 - DNA, 25 bp, Homo sapiens
tcagggcaaggtctccagataagtc

SEQ ID NO: 79021 - DNA, 25 bp, Homo sapiens
agccctgcctgtctggatacaatca

SEQ ID NO: 79022 - DNA, 25 bp, Homo sapiens
caggagcagcagtaggtttcttatc

SEQ ID NO: 79023 - DNA, 25 bp, Homo sapiens
tctaggctccatcctcagcacgtgg

SEQ ID NO: 79024 - DNA, 25 bp, Homo sapiens
tgcaggtaaccagtcccatggcttc

SEQ ID NO: 79025 - DNA, 25 bp, Homo sapiens
agggcactttgcaaacatgatctca

SEQ ID NO: 79026 - DNA, 25 bp, Homo sapiens
tggtgactctgtcctcagcagcctg

SEQ ID NO: 79027 - DNA, 25 bp, Homo sapiens
cagccatcttttgtcggggagcacg

SEQ ID NO: 79028 - DNA, 25 bp, Homo sapiens
attgggcttatgagcaatgttttat

SEQ ID NO: 79029 - DNA, 25 bp, Homo sapiens
aaaaccaaaaaacaactcctcaatg

SEQ ID NO: 79030 - DNA, 25 bp, Homo sapiens
tgcctgagcctggtgaaaaatgccc

SEQ ID NO: 79031 - DNA, 25 bp, Homo sapiens
gagcagatgcatgtcggtttcacca

SEQ ID NO: 79032 - DNA, 25 bp, Homo sapiens
ataaataaataacgtctgtgctctg

SEQ ID NO: 79033 - DNA, 25 bp, Homo sapiens
tccttggacttgtgtgtgactttca

SEQ ID NO: 79034 - DNA, 25 bp, Homo sapiens
ttccgggtgcttctgccttcagatc

SEQ ID NO: 79035 - DNA, 25 bp, Homo sapiens
ccgcctctgggaagattggtgattc

SEQ ID NO: 79036 - DNA, 25 bp, Homo sapiens
ccacctcctccagggtcagtgaatg

SEQ ID NO: 79037 - DNA, 25 bp, Homo sapiens
ttcccagaggaaacttcaggcattg

SEQ ID NO: 79038 - DNA, 25 bp, Homo sapiens
tggatgcccactgagaaagtccttg

SEQ ID NO: 79039 - DNA, 25 bp, Homo sapiens
agctgaagctttggggccacaccta

SEQ ID NO: 79040 - DNA, 25 bp, Homo sapiens
gcttctggcgtaatcctggtgaata

SEQ ID NO: 79041 - DNA, 25 bp, Homo sapiens
ttcgcccgcagaaggtggattttcc

SEQ ID NO: 79042 - DNA, 25 bp, Homo sapiens
atccaggtgttcagcccatgacagc

SEQ ID NO: 79043 - DNA, 25 bp, Homo sapiens
agggcccatacctggctacagatga

SEQ ID NO: 79044 - DNA, 25 bp, Homo sapiens
ctggcttatcctccttgctgcaaga

SEQ ID NO: 79045 - DNA, 25 bp, Homo sapiens
gggcagttctcccagccaagacttg

SEQ ID NO: 79046 - DNA, 25 bp, Homo sapiens
gccctgggctaagtcagcacacttg

SEQ ID NO: 79047 - DNA, 25 bp, Homo sapiens
ttgacctccaaagacgctgtgtgtg

SEQ ID NO: 79048 - DNA, 25 bp, Homo sapiens
gggctggctaccaagtacgctactg

SEQ ID NO: 79049 - DNA, 25 bp, Homo sapiens
tccatctgtgactcgggagccatca

SEQ ID NO: 79050 - DNA, 25 bp, Homo sapiens
tgctctgaagccacaggtgtccctg

SEQ ID NO: 79051 - DNA, 25 bp, Homo sapiens
gctcaagtcttctccaaggccagtg

SEQ ID NO: 79052 - DNA, 25 bp, Homo sapiens
agcctgtgttctttggagccaccga

SEQ ID NO: 79053 - DNA, 25 bp, Homo sapiens
catctgcctggaagacctgggcttc

SEQ ID NO: 79054 - DNA, 25 bp, Homo sapiens
tcgacgctgcctggaaatggacttt

SEQ ID NO: 79055 - DNA, 25 bp, Homo sapiens
ggtgcacggttctcctatctcactg

SEQ ID NO: 79056 - DNA, 25 bp, Homo sapiens
gggccacgttccctttagatacacg

SEQ ID NO: 79057 - DNA, 25 bp, Homo sapiens
gcccggagatgtctgtgaaactgta

SEQ ID NO: 79058 - DNA, 25 bp, Homo sapiens
ggagcacactctcaccttaggcaaa

SEQ ID NO: 79059 - DNA, 25 bp, Homo sapiens
tgggactccagctgccctcacagaa

SEQ ID NO: 79060 - DNA, 25 bp, Homo sapiens
cagcctacctttggggaattcagtc

SEQ ID NO: 79061 - DNA, 25 bp, Homo sapiens
tgctctcagggtaaggacaactcca

SEQ ID NO: 79062 - DNA, 25 bp, Homo sapiens
gccctgcgtggtagcgttcattaaa

SEQ ID NO: 79063 - DNA, 25 bp, Homo sapiens
caccatgggtagaaacgcagttatt

SEQ ID NO: 79064 - DNA, 25 bp, Homo sapiens
atggacgctcagacccttgcaaggc

SEQ ID NO: 79065 - DNA, 25 bp, Homo sapiens
ggcggcctctatctgcccagagaaa

SEQ ID NO: 79066 - DNA, 25 bp, Homo sapiens
cccggcctgcagattgtgttacaca

SEQ ID NO: 79067 - DNA, 25 bp, Homo sapiens
ctgaccttggccatccctttgtgga

SEQ ID NO: 79068 - DNA, 25 bp, Homo sapiens
cctccaccagccacaggaagttggg

SEQ ID NO: 79069 - DNA, 25 bp, Homo sapiens
tctcacagctcaggggccatcattc

SEQ ID NO: 79070 - DNA, 25 bp, Homo sapiens
tgctgggcccacacactatcttttg

SEQ ID NO: 79071 - DNA, 25 bp, Homo sapiens
ttgttccaggaagcatcacaccttg

SEQ ID NO: 79072 - DNA, 25 bp, Homo sapiens
gctgggctgagaaccacactgtttg

SEQ ID NO: 79073 - DNA, 25 bp, Homo sapiens
tccagggtttccagaggcctaagcc

SEQ ID NO: 79074 - DNA, 25 bp, Homo sapiens
accctgcagcaagtacgtccacatg

SEQ ID NO: 79075 - DNA, 25 bp, Homo sapiens
ccaggaccttttgtgtttcagaaga

SEQ ID NO: 79076 - DNA, 25 bp, Homo sapiens
ttccattcaattccacttaattttt

SEQ ID NO: 79077 - DNA, 25 bp, Homo sapiens
tgccagccctagacagaatgatttc

SEQ ID NO: 79078 - DNA, 25 bp, Homo sapiens
gcccggccctaaaatatagtttgca

SEQ ID NO: 79079 - DNA, 25 bp, Homo sapiens
tcgccaggtgtgctgattgcaagtc

SEQ ID NO: 79080 - DNA, 25 bp, Homo sapiens
tggaaagtctgtcccatcccaggtg

SEQ ID NO: 79081 - DNA, 25 bp, Homo sapiens
tcacgttggtccagtcccaggtata

SEQ ID NO: 79082 - DNA, 25 bp, Homo sapiens
catcctgcagattagtggcccttca

SEQ ID NO: 79083 - DNA, 25 bp, Homo sapiens
ccggtgggccctacatgccattaca

SEQ ID NO: 79084 - DNA, 25 bp, Homo sapiens
agaggccatctttgccctgtgattg

SEQ ID NO: 79085 - DNA, 25 bp, Homo sapiens
ggctcgtagctggagtcattactta

SEQ ID NO: 79086 - DNA, 25 bp, Homo sapiens
ttcctgcagctgaaggggatcctga

SEQ ID NO: 79087 - DNA, 25 bp, Homo sapiens
ctctcccaggtggtaagctccaatg

SEQ ID NO: 79088 - DNA, 25 bp, Homo sapiens
tgcccacgcgtctctgtgccagact

SEQ ID NO: 79089 - DNA, 25 bp, Homo sapiens
atccgtgttcagtgtgcagtgtgca

SEQ ID NO: 79090 - DNA, 25 bp, Homo sapiens
actcgtatctgggagtgcctcagca

SEQ ID NO: 79091 - DNA, 25 bp, Homo sapiens
gggtgccgtacccacttctcgatca

SEQ ID NO: 79092 - DNA, 25 bp, Homo sapiens
gctgggctctggtcatcttgaaaga

SEQ ID NO: 79093 - DNA, 25 bp, Homo sapiens
cgtgcaccctcgttccatttgtttg

SEQ ID NO: 79094 - DNA, 25 bp, Homo sapiens
tggcaagctctagcaacgctgcaga

SEQ ID NO: 79095 - DNA, 25 bp, Homo sapiens
gtctggagtaagatctgttcctata

SEQ ID NO: 79096 - DNA, 25 bp, Homo sapiens
gttaccttgtgtctttaagagctgt

SEQ ID NO: 79097 - DNA, 25 bp, Homo sapiens
gccaatgggcctctgtaataaaaaa

SEQ ID NO: 79098 - DNA, 25 bp, Homo sapiens
tcagtcccaggacaggaaaagtttc

SEQ ID NO: 79099 - DNA, 25 bp, Homo sapiens
cctgattctgagttcccgggaagcc

SEQ ID NO: 79100 - DNA, 25 bp, Homo sapiens
tccagcctgggaacaagaggagcct

SEQ ID NO: 79101 - DNA, 25 bp, Homo sapiens
gctcatagctatagaggggcaccta

SEQ ID NO: 79102 - DNA, 25 bp, Homo sapiens
ggcagagctagtttcacccaggaga

SEQ ID NO: 79103 - DNA, 25 bp, Homo sapiens
cagcagccctgtcttcattaagatg

SEQ ID NO: 79104 - DNA, 25 bp, Homo sapiens
acattttacaggacagggcgccacc

SEQ ID NO: 79105 - DNA, 25 bp, Homo sapiens
tgggtcacactcttcacgcggatta

SEQ ID NO: 79106 - DNA, 25 bp, Homo sapiens
ggcacccagggtcatctttacgaac

SEQ ID NO: 79107 - DNA, 25 bp, Homo sapiens
ccaccaggagcaaggcacaggtcta

SEQ ID NO: 79108 - DNA, 25 bp, Homo sapiens
cagatgcctgccttgtggatgcaaa

SEQ ID NO: 79109 - DNA, 25 bp, Homo sapiens
ccgagccagcaactcaaaagggttc

SEQ ID NO: 79110 - DNA, 25 bp, Homo sapiens
ctgactctgtgtttgcctttaagga

SEQ ID NO: 79111 - DNA, 25 bp, Homo sapiens
ctctctggttcttggtgcgtatctt

SEQ ID NO: 79112 - DNA, 25 bp, Homo sapiens
gtccgactccaaaatccatgctgtg

SEQ ID NO: 79113 - DNA, 25 bp, Homo sapiens
gcctctttgggtcaggaaatcgtta

SEQ ID NO: 79114 - DNA, 25 bp, Homo sapiens
cgtactttggggcatctctggcatt

SEQ ID NO: 79115 - DNA, 25 bp, Homo sapiens
ttggacctcgtcctctgggctaaga

SEQ ID NO: 79116 - DNA, 25 bp, Homo sapiens
agtcccgtacgtcctgtgcaacaca

SEQ ID NO: 79117 - DNA, 25 bp, Homo sapiens
gccgagggtctatgtctcccacata

SEQ ID NO: 79118 - DNA, 25 bp, Homo sapiens
ggtcccaagggtctcgaaatctagc

SEQ ID NO: 79119 - DNA, 25 bp, Homo sapiens
cacacagggtggatcgataaaaata

SEQ ID NO: 79120 - DNA, 25 bp, Homo sapiens
cctggtgttcagatccgaagtaatg

SEQ ID NO: 79121 - DNA, 25 bp, Homo sapiens
aatcattggttccttccggcacgtc

SEQ ID NO: 79122 - DNA, 25 bp, Homo sapiens
tagtgtccacagctgatccctctcg

SEQ ID NO: 79123 - DNA, 25 bp, Homo sapiens
acctgtgagcttggccgtgtaaaga

SEQ ID NO: 79124 - DNA, 25 bp, Homo sapiens
actggcaggccacagcgtgcttaaa

SEQ ID NO: 79125 - DNA, 25 bp, Homo sapiens
ggtgtctcctgctctctccagaatg

SEQ ID NO: 79126 - DNA, 25 bp, Homo sapiens
tgagatcatcagacacccaggggca

SEQ ID NO: 79127 - DNA, 25 bp, Homo sapiens
gggcaccctggctgaaaacaacata

SEQ ID NO: 79128 - DNA, 25 bp, Homo sapiens
atttagagggactcagtttcctagg

SEQ ID NO: 79129 - DNA, 25 bp, Homo sapiens
gggtaaatgaccctcgcagcctttc

SEQ ID NO: 79130 - DNA, 25 bp, Homo sapiens
gtcagtttattccaccaaagaactt

SEQ ID NO: 79131 - DNA, 25 bp, Homo sapiens
tttttaaaagttaaaatgctacaac

SEQ ID NO: 79132 - DNA, 25 bp, Homo sapiens
cctgatagtttaaagtgtgaaactc

SEQ ID NO: 79133 - DNA, 25 bp, Homo sapiens
tcaggcaaaatgatggagtcctttt

SEQ ID NO: 79134 - DNA, 25 bp, Homo sapiens
catcacattgtggaagacattttta

SEQ ID NO: 79135 - DNA, 25 bp, Homo sapiens
gctcacggtttcctactagtacata

SEQ ID NO: 79136 - DNA, 25 bp, Homo sapiens
tagccaatctagaattatcaggttg

SEQ ID NO: 79137 - DNA, 25 bp, Homo sapiens
attgctccaaattagtatgcccatc

SEQ ID NO: 79138 - DNA, 25 bp, Homo sapiens
ctccaaggattccacatacacacag

SEQ ID NO: 79139 - DNA, 25 bp, Homo sapiens
ttagagtgggcgggcggagggggcg

SEQ ID NO: 79140 - DNA, 25 bp, Homo sapiens
tattttaccacagctttcaaaatgg

SEQ ID NO: 79141 - DNA, 25 bp, Homo sapiens
atcctccacctgtcggggaactgtg

SEQ ID NO: 79142 - DNA, 25 bp, Homo sapiens
tgtgagcccacattcaacatttctg

SEQ ID NO: 79143 - DNA, 25 bp, Homo sapiens
gtgggctccctttatcatcaacgtg

SEQ ID NO: 79144 - DNA, 25 bp, Homo sapiens
ccacgagggcatagtgcagttcact

SEQ ID NO: 79145 - DNA, 25 bp, Homo sapiens
tttcagggcagttcattctcaatgg

SEQ ID NO: 79146 - DNA, 25 bp, Homo sapiens
cccttggactgtgaatgtatgtttc

SEQ ID NO: 79147 - DNA, 25 bp, Homo sapiens
agagaattttccactaaaggcaggg

SEQ ID NO: 79148 - DNA, 25 bp, Homo sapiens
gacacgtgatttataagtaggacag

SEQ ID NO: 79149 - DNA, 25 bp, Homo sapiens
gaggtccctgtagccaagcatctgg

SEQ ID NO: 79150 - DNA, 25 bp, Homo sapiens
cgtcgctaacatgacttcaggtcta

SEQ ID NO: 79151 - DNA, 25 bp, Homo sapiens
ccagggctgctgctctctgaaaata

SEQ ID NO: 79152 - DNA, 25 bp, Homo sapiens
ctccactgtgcctgtagggaaactg

SEQ ID NO: 79153 - DNA, 25 bp, Homo sapiens
ctgggatttgaactcagacctggct

SEQ ID NO: 79154 - DNA, 25 bp, Homo sapiens
gtctggtcaactctccacggaaata

SEQ ID NO: 79155 - DNA, 25 bp, Homo sapiens
tgtgacactcccgtctgcaaactct

SEQ ID NO: 79156 - DNA, 25 bp, Homo sapiens
gcgttctgtggctgtcatttccata

SEQ ID NO: 79157 - DNA, 25 bp, Homo sapiens
ctgaggacatctgcaattctggtga

SEQ ID NO: 79158 - DNA, 25 bp, Homo sapiens
cagacttttccactggctgcgagta

SEQ ID NO: 79159 - DNA, 25 bp, Homo sapiens
cctcagctgtatccaggggctttta

SEQ ID NO: 79160 - DNA, 25 bp, Homo sapiens
ggtcaaatccgtgcaaagcgcctgc

SEQ ID NO: 79161 - DNA, 25 bp, Homo sapiens
ggcccgatcacacccaggccctgca

SEQ ID NO: 79162 - DNA, 25 bp, Homo sapiens
cgtggggcctcttcaagttttcctc

SEQ ID NO: 79163 - DNA, 25 bp, Homo sapiens
ccccagaaaggcacccagatccttc

SEQ ID NO: 79164 - DNA, 25 bp, Homo sapiens
gcctggggccctaaatgctttcaca

SEQ ID NO: 79165 - DNA, 25 bp, Homo sapiens
gctgtgactcaccattggctccggc

SEQ ID NO: 79166 - DNA, 25 bp, Homo sapiens
cacccactggagctctttgtcttca

SEQ ID NO: 79167 - DNA, 25 bp, Homo sapiens
ctgagccatgtctccacgcagatga

SEQ ID NO: 79168 - DNA, 25 bp, Homo sapiens
tctgggaaccgaacacaaggtgctt

SEQ ID NO: 79169 - DNA, 25 bp, Homo sapiens
cccgcctccatgttttggtgaataa

SEQ ID NO: 79170 - DNA, 25 bp, Homo sapiens
agaccaccctcgttgtttccatttg

SEQ ID NO: 79171 - DNA, 25 bp, Homo sapiens
ggtggggacacctttggcacaattt

SEQ ID NO: 79172 - DNA, 25 bp, Homo sapiens
aaaccctgagtgagccttctggaca

SEQ ID NO: 79173 - DNA, 25 bp, Homo sapiens
ctcgggcatcgaaaggacaagctta

SEQ ID NO: 79174 - DNA, 25 bp, Homo sapiens
cctctctgacaaggagcggctctgc

SEQ ID NO: 79175 - DNA, 25 bp, Homo sapiens
ggtcccctgcgtgtgtcaagtctct

SEQ ID NO: 79176 - DNA, 25 bp, Homo sapiens
tgaagaccatcttaggggcctactg

SEQ ID NO: 79177 - DNA, 25 bp, Homo sapiens
ttttttaaattctttgctggaattc

SEQ ID NO: 79178 - DNA, 25 bp, Homo sapiens
tgatgctgacctgaaatgcccacga

SEQ ID NO: 79179 - DNA, 25 bp, Homo sapiens
gctgctgctgctcaaatctcctatg

SEQ ID NO: 79180 - DNA, 25 bp, Homo sapiens
acccagttgttggtctcagctgtga

SEQ ID NO: 79181 - DNA, 25 bp, Homo sapiens
ggagacctttcctgtgtatccaaca

SEQ ID NO: 79182 - DNA, 25 bp, Homo sapiens
ggggagcctcctcattcacataaca

SEQ ID NO: 79183 - DNA, 25 bp, Homo sapiens
ccttggatctgacccgggaaaatga

SEQ ID NO: 79184 - DNA, 25 bp, Homo sapiens
cgtccactgactgtagagcccattc

SEQ ID NO: 79185 - DNA, 25 bp, Homo sapiens
ggcagacgccagtaaagtgaccagt

SEQ ID NO: 79186 - DNA, 25 bp, Homo sapiens
gtgctgtgccactcatgatcctttg

SEQ ID NO: 79187 - DNA, 25 bp, Homo sapiens
ggggtcctcgccctggataaaaacc

SEQ ID NO: 79188 - DNA, 25 bp, Homo sapiens
tcagcgttctaagagcccacagagg

SEQ ID NO: 79189 - DNA, 25 bp, Homo sapiens
tgcgcgttcatcagctcaataaatc

SEQ ID NO: 79190 - DNA, 25 bp, Homo sapiens
aacccgttggtggagacccttcaga

SEQ ID NO: 79191 - DNA, 25 bp, Homo sapiens
tgcacagtgcaaaagcatgcgtacc

SEQ ID NO: 79192 - DNA, 25 bp, Homo sapiens
agacctgtttcctctacctgggcga

SEQ ID NO: 79193 - DNA, 25 bp, Homo sapiens
tggctctccaacatccagtggactg

SEQ ID NO: 79194 - DNA, 25 bp, Homo sapiens
ccagctggtatgtgctcacgaaaca

SEQ ID NO: 79195 - DNA, 25 bp, Homo sapiens
ttccagacgctaccacagcaggggc

SEQ ID NO: 79196 - DNA, 25 bp, Homo sapiens
ctggatccagggaccaaggactttc

SEQ ID NO: 79197 - DNA, 25 bp, Homo sapiens
aatcaggctgtgcatacccaagggc

SEQ ID NO: 79198 - DNA, 25 bp, Homo sapiens
gtgcagtctgtccttctcctgggca

SEQ ID NO: 79199 - DNA, 25 bp, Homo sapiens
ggtagggtcaccatccacacttctg

SEQ ID NO: 79200 - DNA, 25 bp, Homo sapiens
acctgtgactctcctgccgttgaca

SEQ ID NO: 79201 - DNA, 25 bp, Homo sapiens
cccgaccctggaactggcgtctttt

SEQ ID NO: 79202 - DNA, 25 bp, Homo sapiens
agagccctttcttctggatcctgcc

SEQ ID NO: 79203 - DNA, 25 bp, Homo sapiens
gccagccttggtgctatggttcaga

SEQ ID NO: 79204 - DNA, 25 bp, Homo sapiens
caccgtatggggagctcttgattaa

SEQ ID NO: 79205 - DNA, 25 bp, Homo sapiens
cagccagttcgtctttgccttgtca

SEQ ID NO: 79206 - DNA, 25 bp, Homo sapiens
caggctgtgctccttgctatgatca

SEQ ID NO: 79207 - DNA, 25 bp, Homo sapiens
ggctcgcccagctcctggaaatttt

SEQ ID NO: 79208 - DNA, 25 bp, Homo sapiens
gacactacatgagagccctggcttg

SEQ ID NO: 79209 - DNA, 25 bp, Homo sapiens
gagctgcactcgttccaataccata

SEQ ID NO: 79210 - DNA, 25 bp, Homo sapiens
gccaccctgggtcatagcctttgtc

SEQ ID NO: 79211 - DNA, 25 bp, Homo sapiens
gccgtgtgctcgctcaagtgtcaaa

SEQ ID NO: 79212 - DNA, 25 bp, Homo sapiens
gccagctctctgtgtccctttgatc

SEQ ID NO: 79213 - DNA, 25 bp, Homo sapiens
ggcagcggtccttgattaattattc

SEQ ID NO: 79214 - DNA, 25 bp, Homo sapiens
tggggctcccagatgactcgataac

SEQ ID NO: 79215 - DNA, 25 bp, Homo sapiens
ccctgctctctctggttggaaatga

SEQ ID NO: 79216 - DNA, 25 bp, Homo sapiens
agcctggcctgaagggtttctcttc

SEQ ID NO: 79217 - DNA, 25 bp, Homo sapiens
gagcctctggcagtgagtcaccaca

SEQ ID NO: 79218 - DNA, 25 bp, Homo sapiens
gggtcgccaacactcccaggcatta

SEQ ID NO: 79219 - DNA, 25 bp, Homo sapiens
cctgcgaagagcctgggattgcata

SEQ ID NO: 79220 - DNA, 25 bp, Homo sapiens
tatatttaacattctgcccggggcc

SEQ ID NO: 79221 - DNA, 25 bp, Homo sapiens
cccagggactcatgtgtgtgacaca

SEQ ID NO: 79222 - DNA, 25 bp, Homo sapiens
tatcgtccatcttggggtcaacatg

SEQ ID NO: 79223 - DNA, 25 bp, Homo sapiens
acagccttgtggtggccagagaacc

SEQ ID NO: 79224 - DNA, 25 bp, Homo sapiens
cctgggcgtgtcctaagttgattga

SEQ ID NO: 79225 - DNA, 25 bp, Homo sapiens
ccttggagacccagatcagactctg

SEQ ID NO: 79226 - DNA, 25 bp, Homo sapiens
aggacctcttccatgcctggtggta

SEQ ID NO: 79227 - DNA, 25 bp, Homo sapiens
gaggccctgattaggtctcccaaga

SEQ ID NO: 79228 - DNA, 25 bp, Homo sapiens
gtggctttacgagcacccagtgttc

SEQ ID NO: 79229 - DNA, 25 bp, Homo sapiens
cctggcgtgtcttcattttggatca

SEQ ID NO: 79230 - DNA, 25 bp, Homo sapiens
ggggctccatgcccttctcccactg

SEQ ID NO: 79231 - DNA, 25 bp, Homo sapiens
acctggcaggcactttgagaatgtc

SEQ ID NO: 79232 - DNA, 25 bp, Homo sapiens
tccatcggccctttgtgcagtcatg

SEQ ID NO: 79233 - DNA, 25 bp, Homo sapiens
tgttacctgcctgtcacctgggcga

SEQ ID NO: 79234 - DNA, 25 bp, Homo sapiens
aaatcgcgcttgcatcctgctcggg

SEQ ID NO: 79235 - DNA, 25 bp, Homo sapiens
cagtgatcctggaagccctgctaca

SEQ ID NO: 79236 - DNA, 25 bp, Homo sapiens
ggagaccatcactgcaaagcttttg

SEQ ID NO: 79237 - DNA, 25 bp, Homo sapiens
gggcggctggtttatccttgaccca

SEQ ID NO: 79238 - DNA, 25 bp, Homo sapiens
ttgtgcagccgacagaccttgtttg

SEQ ID NO: 79239 - DNA, 25 bp, Homo sapiens
ccgagttccgaatccagtgcaggtt

SEQ ID NO: 79240 - DNA, 25 bp, Homo sapiens
ggactcctccctgtctcagtaagtg

SEQ ID NO: 79241 - DNA, 25 bp, Homo sapiens
cagccgatgttcctggacctttgga

SEQ ID NO: 79242 - DNA, 25 bp, Homo sapiens
ggattcctcagggaccaaggcctca

SEQ ID NO: 79243 - DNA, 25 bp, Homo sapiens
cctgggacacagaggccattgtttc

SEQ ID NO: 79244 - DNA, 25 bp, Homo sapiens
gggttgcatctctctgtttcctggc

SEQ ID NO: 79245 - DNA, 25 bp, Homo sapiens
agctccatgcttttagggcccggtg

SEQ ID NO: 79246 - DNA, 25 bp, Homo sapiens
ccaggccaggcagtgacatcaaatt

SEQ ID NO: 79247 - DNA, 25 bp, Homo sapiens
ggcacactgtggtctcttctcagga

SEQ ID NO: 79248 - DNA, 25 bp, Homo sapiens
actgtctgagaccagggcctctgca

SEQ ID NO: 79249 - DNA, 25 bp, Homo sapiens
tcgtagacttccagctgtgccctta

SEQ ID NO: 79250 - DNA, 25 bp, Homo sapiens
tgggccctgactgactctcaagcta

SEQ ID NO: 79251 - DNA, 25 bp, Homo sapiens
tggccagcccagcattcctcagtta

SEQ ID NO: 79252 - DNA, 25 bp, Homo sapiens
cctgctcttagggacattcatggga

SEQ ID NO: 79253 - DNA, 25 bp, Homo sapiens
gcacttaggacagacccagcattta

SEQ ID NO: 79254 - DNA, 25 bp, Homo sapiens
ctcccaggtcatcgtggccataata

SEQ ID NO: 79255 - DNA, 25 bp, Homo sapiens
aatggcagcagtcagttccctaggc

SEQ ID NO: 79256 - DNA, 25 bp, Homo sapiens
cttcctggtctatgccatggacgta

SEQ ID NO: 79257 - DNA, 25 bp, Homo sapiens
ggtcatcatgatctgcgtggccctc

SEQ ID NO: 79258 - DNA, 25 bp, Homo sapiens
gtgcgcgtctttccatctggttgtc

SEQ ID NO: 79259 - DNA, 25 bp, Homo sapiens
ggcgttgacccatccagtctctgaa

SEQ ID NO: 79260 - DNA, 25 bp, Homo sapiens
ctgcactgctcttcagggaaattca

SEQ ID NO: 79261 - DNA, 25 bp, Homo sapiens
gggagctcctgccattgttcattta

SEQ ID NO: 79262 - DNA, 25 bp, Homo sapiens
tgtgtgtcagctccctcaagatcga

SEQ ID NO: 79263 - DNA, 25 bp, Homo sapiens
ggtggaccattcagggtagaccttc

SEQ ID NO: 79264 - DNA, 25 bp, Homo sapiens
gtgacattttcattccaggagcctg

SEQ ID NO: 79265 - DNA, 25 bp, Homo sapiens
ctcctgtgccttctcgagtgtcgga

SEQ ID NO: 79266 - DNA, 25 bp, Homo sapiens
gagcaccgtctgatgagcacctcta

SEQ ID NO: 79267 - DNA, 25 bp, Homo sapiens
tgggctccgggtccacataaaaacc

SEQ ID NO: 79268 - DNA, 25 bp, Homo sapiens
ctgtgtccaagtgcctgtccaagtg

SEQ ID NO: 79269 - DNA, 25 bp, Homo sapiens
cctgggtcttcgctcaacatcatcg

SEQ ID NO: 79270 - DNA, 25 bp, Homo sapiens
tggggccaagtcctcctgcttcaaa

SEQ ID NO: 79271 - DNA, 25 bp, Homo sapiens
gcacgggtccttaaggttcggcacc

SEQ ID NO: 79272 - DNA, 25 bp, Homo sapiens
catccctgctctgagaaaacgtgtg

SEQ ID NO: 79273 - DNA, 25 bp, Homo sapiens
gataaatggctcttcctcctgggca

SEQ ID NO: 79274 - DNA, 25 bp, Homo sapiens
tgagagtcccacagccatgaccatg

SEQ ID NO: 79275 - DNA, 25 bp, Homo sapiens
gcactgttgctgttgccttgatatc

SEQ ID NO: 79276 - DNA, 25 bp, Homo sapiens
gggctccagctccagtcatgcgatt

SEQ ID NO: 79277 - DNA, 25 bp, Homo sapiens
gtgtgatctctcctcctcaccagga

SEQ ID NO: 79278 - DNA, 25 bp, Homo sapiens
gccgggagtccaccttctcatcaga

SEQ ID NO: 79279 - DNA, 25 bp, Homo sapiens
ggttcccaccctgcagatgaaaatc

SEQ ID NO: 79280 - DNA, 25 bp, Homo sapiens
tttgcaagagggatcagggctcatc

SEQ ID NO: 79281 - DNA, 25 bp, Homo sapiens
cagggtccctgagttctcgcagaga

SEQ ID NO: 79282 - DNA, 25 bp, Homo sapiens
gagcaactgcctttctggtgaccga

SEQ ID NO: 79283 - DNA, 25 bp, Homo sapiens
ggacctgtttgccacaatgcccttg

SEQ ID NO: 79284 - DNA, 25 bp, Homo sapiens
tcccactgggtgctcgtcacaaagc

SEQ ID NO: 79285 - DNA, 25 bp, Homo sapiens
aggaccgttctcaccctgtgggaca

SEQ ID NO: 79286 - DNA, 25 bp, Homo sapiens
ccagtgacattgtgtgagtagcacc

SEQ ID NO: 79287 - DNA, 25 bp, Homo sapiens
cggtcagcgctggaaacttctatta

SEQ ID NO: 79288 - DNA, 25 bp, Homo sapiens
tggggtctatcacgttcctgggatc

SEQ ID NO: 79289 - DNA, 25 bp, Homo sapiens
tcgtgtcctgctgacccataaaagg

SEQ ID NO: 79290 - DNA, 25 bp, Homo sapiens
tggagagtcacatgaccagcacgtc

SEQ ID NO: 79291 - DNA, 25 bp, Homo sapiens
agtggcttgacctcctgtctgctga

SEQ ID NO: 79292 - DNA, 25 bp, Homo sapiens
ccaggcattcttccaggcatgtgtc

SEQ ID NO: 79293 - DNA, 25 bp, Homo sapiens
tggtctcgctcagcccatcatgttg

SEQ ID NO: 79294 - DNA, 25 bp, Homo sapiens
ggtccacctacctttggcaatgtca

SEQ ID NO: 79295 - DNA, 25 bp, Homo sapiens
tgtagggtgggcactgctctgctca

SEQ ID NO: 79296 - DNA, 25 bp, Homo sapiens
tggcacgtctgctgctcacaaaagg

SEQ ID NO: 79297 - DNA, 25 bp, Homo sapiens
tccggagataccaacagccatgtgc

SEQ ID NO: 79298 - DNA, 25 bp, Homo sapiens
agtcctcgcgatgtggttaccattg

SEQ ID NO: 79299 - DNA, 25 bp, Homo sapiens
cctctggcccttgaagactgtaatg

SEQ ID NO: 79300 - DNA, 25 bp, Homo sapiens
ggagtctccatctaaaccaccgtgt

SEQ ID NO: 79301 - DNA, 25 bp, Homo sapiens
ccgggagcccaagtttcttacaaga

SEQ ID NO: 79302 - DNA, 25 bp, Homo sapiens
tttgggcctgaagtctgctaagaga

SEQ ID NO: 79303 - DNA, 25 bp, Homo sapiens
agctgtcatgcaaggtcaactatac

SEQ ID NO: 79304 - DNA, 25 bp, Homo sapiens
tcattctttttattttctggggagc

SEQ ID NO: 79305 - DNA, 25 bp, Homo sapiens
ttccttggggaaatcttgcatcaga

SEQ ID NO: 79306 - DNA, 25 bp, Homo sapiens
ggctacggggtgcatattttcttga

SEQ ID NO: 79307 - DNA, 25 bp, Homo sapiens
tctcaatgacttttggtgataaata

SEQ ID NO: 79308 - DNA, 25 bp, Homo sapiens
atggtaactgtgaacaaagtatttt

SEQ ID NO: 79309 - DNA, 25 bp, Homo sapiens
tcttccaagagatggccaaattagg

SEQ ID NO: 79310 - DNA, 25 bp, Homo sapiens
tttaattactatttgtgctcctgca

SEQ ID NO: 79311 - DNA, 25 bp, Homo sapiens
gggcggaggtgaactttaaaccaca

SEQ ID NO: 79312 - DNA, 25 bp, Homo sapiens
gccacaaagggatatgctcttcctg

SEQ ID NO: 79313 - DNA, 25 bp, Homo sapiens
ctcagccaggcccagaaaatgtatg

SEQ ID NO: 79314 - DNA, 25 bp, Homo sapiens
ccaactaaattgtatcagggacact

SEQ ID NO: 79315 - DNA, 25 bp, Homo sapiens
taatagcctttgtggacacccactg

SEQ ID NO: 79316 - DNA, 25 bp, Homo sapiens
ggcagacctgcttctttaacacatg

SEQ ID NO: 79317 - DNA, 25 bp, Homo sapiens
gtgtggactaaaacaggcagcagta

SEQ ID NO: 79318 - DNA, 25 bp, Homo sapiens
ggctcagctcagcatagtgattgga

SEQ ID NO: 79319 - DNA, 25 bp, Homo sapiens
cccatgttcatgtgacaaggttgta

SEQ ID NO: 79320 - DNA, 25 bp, Homo sapiens
gaggcacattgcaacccagtcgcta

SEQ ID NO: 79321 - DNA, 25 bp, Homo sapiens
ttgtcctttgtacatacatcatttg

SEQ ID NO: 79322 - DNA, 25 bp, Homo sapiens
cgctgacttacattagggaagccta

SEQ ID NO: 79323 - DNA, 25 bp, Homo sapiens
gggcaggcctactccactttggaaa

SEQ ID NO: 79324 - DNA, 25 bp, Homo sapiens
gccagtgtgattttatgtgcctccc

SEQ ID NO: 79325 - DNA, 25 bp, Homo sapiens
ccctggctaaaagcactgtcgttta

SEQ ID NO: 79326 - DNA, 25 bp, Homo sapiens
cagtcctcatagcatggccaaagtc

SEQ ID NO: 79327 - DNA, 25 bp, Homo sapiens
caggctttattgtacaggggtcacc

SEQ ID NO: 79328 - DNA, 25 bp, Homo sapiens
tgctgagctcaaaggaaggcgcttc

SEQ ID NO: 79329 - DNA, 25 bp, Homo sapiens
ccagcgtcctggtaggcctaatata

SEQ ID NO: 79330 - DNA, 25 bp, Homo sapiens
ttccgcctgagcttgctgtaaacta

SEQ ID NO: 79331 - DNA, 25 bp, Homo sapiens
ttctgctggcacaatgaatgttcta

SEQ ID NO: 79332 - DNA, 25 bp, Homo sapiens
tctgagtgtccaaaaggctgtaaca

SEQ ID NO: 79333 - DNA, 25 bp, Homo sapiens
ggcagactgcagtggactattttta

SEQ ID NO: 79334 - DNA, 25 bp, Homo sapiens
ttccggctctcgcaagacagtctta

SEQ ID NO: 79335 - DNA, 25 bp, Homo sapiens
gggtgcttggtcagatcactgaatc

SEQ ID NO: 79336 - DNA, 25 bp, Homo sapiens
ggactactggtctccttcaaatttg

SEQ ID NO: 79337 - DNA, 25 bp, Homo sapiens
cagggctacttcctttggcacaaca

SEQ ID NO: 79338 - DNA, 25 bp, Homo sapiens
ctaccgtaatatggcagacagtcta

SEQ ID NO: 79339 - DNA, 25 bp, Homo sapiens
tgagagaacctcaaaaccctgcttt

SEQ ID NO: 79340 - DNA, 25 bp, Homo sapiens
agacagcatcagcagtttggacacc

SEQ ID NO: 79341 - DNA, 25 bp, Homo sapiens
caggaatgtttccaccgtgcagcaa

SEQ ID NO: 79342 - DNA, 25 bp, Homo sapiens
cagggcggtttaactgcaatactta

SEQ ID NO: 79343 - DNA, 25 bp, Homo sapiens
aagaccgtgttttgcattttgctca

SEQ ID NO: 79344 - DNA, 25 bp, Homo sapiens
atgtggcaagcacccaagaccgtta

SEQ ID NO: 79345 - DNA, 25 bp, Homo sapiens
ccgagggacatattgccagatgaca

SEQ ID NO: 79346 - DNA, 25 bp, Homo sapiens
tggggcttccacaccaaagaggcct

SEQ ID NO: 79347 - DNA, 25 bp, Homo sapiens
ccagggattcctgatggtgactgta

SEQ ID NO: 79348 - DNA, 25 bp, Homo sapiens
ggcccaaataccaggatgcactcta

SEQ ID NO: 79349 - DNA, 25 bp, Homo sapiens
agcatcggcttgactcttcagttta

SEQ ID NO: 79350 - DNA, 25 bp, Homo sapiens
atctggatttggtcggtcgttaacc

SEQ ID NO: 79351 - DNA, 25 bp, Homo sapiens
gcgtcaggacactcaccgcgtagtg

SEQ ID NO: 79352 - DNA, 25 bp, Homo sapiens
cccactgtactgaaccggctgaatg

SEQ ID NO: 79353 - DNA, 25 bp, Homo sapiens
tggaggccttccttgctctgtgaca

SEQ ID NO: 79354 - DNA, 25 bp, Homo sapiens
ggctcaaagctccagaaaggatcta

SEQ ID NO: 79355 - DNA, 25 bp, Homo sapiens
gctgagggcccatctgagtactaaa

SEQ ID NO: 79356 - DNA, 25 bp, Homo sapiens
ggccctccttggctgaaatcatgtg

SEQ ID NO: 79357 - DNA, 25 bp, Homo sapiens
caccgcaggtgctagaattattgtt

SEQ ID NO: 79358 - DNA, 25 bp, Homo sapiens
tactctggtgcctgcaggtttcaaa

SEQ ID NO: 79359 - DNA, 25 bp, Homo sapiens
tgttatcccgtgcaacacagtttga

SEQ ID NO: 79360 - DNA, 25 bp, Homo sapiens
ttagccacttgttccctgttgttga

SEQ ID NO: 79361 - DNA, 25 bp, Homo sapiens
acatgagtagtgcaaagctggcttc

SEQ ID NO: 79362 - DNA, 25 bp, Homo sapiens
ccggagccacgttcaaatttcactg

SEQ ID NO: 79363 - DNA, 25 bp, Homo sapiens
ggagcttctgtaccactttctattg

SEQ ID NO: 79364 - DNA, 25 bp, Homo sapiens
ggcttgcacccatctgtcctggatt

SEQ ID NO: 79365 - DNA, 25 bp, Homo sapiens
gggatgctctccaatctcagggctg

SEQ ID NO: 79366 - DNA, 25 bp, Homo sapiens
aggggccatgccactttgctttcta

SEQ ID NO: 79367 - DNA, 25 bp, Homo sapiens
acgcagtctgctcagtgggttaatc

SEQ ID NO: 79368 - DNA, 25 bp, Homo sapiens
agcgaatgttgaccactggtttaga

SEQ ID NO: 79369 - DNA, 25 bp, Homo sapiens
tctgagctcactttgcctacttgga

SEQ ID NO: 79370 - DNA, 25 bp, Homo sapiens
ctgaccactgtgatgagaatttcca

SEQ ID NO: 79371 - DNA, 25 bp, Homo sapiens
cacgcactttctccaagatgaggga

SEQ ID NO: 79372 - DNA, 25 bp, Homo sapiens
tgcccttccgttgtctcagaccata

SEQ ID NO: 79373 - DNA, 25 bp, Homo sapiens
actgccagctgagacaccacctttg

SEQ ID NO: 79374 - DNA, 25 bp, Homo sapiens
cacaatgctgctggggaacactcta

SEQ ID NO: 79375 - DNA, 25 bp, Homo sapiens
gctgacctccgttgcaaaccactgg

SEQ ID NO: 79376 - DNA, 25 bp, Homo sapiens
gggttcagagtaaccacattgttca

SEQ ID NO: 79377 - DNA, 25 bp, Homo sapiens
agaggcatccttacatgggcattta

SEQ ID NO: 79378 - DNA, 25 bp, Homo sapiens
ggctttgtctcatgctgtcccagaa

SEQ ID NO: 79379 - DNA, 25 bp, Homo sapiens
gcacaacttggggagatgccagatc

SEQ ID NO: 79380 - DNA, 25 bp, Homo sapiens
atccgtggcttctctccaattgtag

SEQ ID NO: 79381 - DNA, 25 bp, Homo sapiens
tgggcccagcagaagacaacccttc

SEQ ID NO: 79382 - DNA, 25 bp, Homo sapiens
tttcctgtattaagatggtccctga

SEQ ID NO: 79383 - DNA, 25 bp, Homo sapiens
agtggctttttaattgaactgaaca

SEQ ID NO: 79384 - DNA, 25 bp, Homo sapiens
tcagccctaggttgtgcatttaata

SEQ ID NO: 79385 - DNA, 25 bp, Homo sapiens
cagagctggagggtcatttactttc

SEQ ID NO: 79386 - DNA, 25 bp, Homo sapiens
agcaaggctgctttcctaatttaga

SEQ ID NO: 79387 - DNA, 25 bp, Homo sapiens
taggtgtctcccattagcattggtg

SEQ ID NO: 79388 - DNA, 25 bp, Homo sapiens
catgccctctttgtggctgaatata

SEQ ID NO: 79389 - DNA, 25 bp, Homo sapiens
aatcttgtttgccaggtcgccacgc

SEQ ID NO: 79390 - DNA, 25 bp, Homo sapiens
ctgggcctcttgaatgtcaatgatc

SEQ ID NO: 79391 - DNA, 25 bp, Homo sapiens
gcgaattctaggcttgcccatggta

SEQ ID NO: 79392 - DNA, 25 bp, Homo sapiens
tcctggtaccttctagtgttctagc

SEQ ID NO: 79393 - DNA, 25 bp, Homo sapiens
ggacctctttgcaacccaggaacta

SEQ ID NO: 79394 - DNA, 25 bp, Homo sapiens
tggtcgtgcaggacactttccctta

SEQ ID NO: 79395 - DNA, 25 bp, Homo sapiens
atccagggcttgagaccattcattc

SEQ ID NO: 79396 - DNA, 25 bp, Homo sapiens
gctgcattcctgtttgggctcaatc

SEQ ID NO: 79397 - DNA, 25 bp, Homo sapiens
ttggctgctcaactgctccactaga

SEQ ID NO: 79398 - DNA, 25 bp, Homo sapiens
ggcaggggacaagaagccctttttc

SEQ ID NO: 79399 - DNA, 25 bp, Homo sapiens
tggtaaaaagcatttgagtgtaata

SEQ ID NO: 79400 - DNA, 25 bp, Homo sapiens
aaattgacaatttttcagttatgag

SEQ ID NO: 79401 - DNA, 25 bp, Homo sapiens
tgcaaagcatgaaaaaaaacccata

SEQ ID NO: 79402 - DNA, 25 bp, Homo sapiens
agaagctcatctctcctggaccttg

SEQ ID NO: 79403 - DNA, 25 bp, Homo sapiens
gctgccctttctgccacaatgaatg

SEQ ID NO: 79404 - DNA, 25 bp, Homo sapiens
ttccacagcttagagggcatttccc

SEQ ID NO: 79405 - DNA, 25 bp, Homo sapiens
ccaggagtgcccagaaatttatatc

SEQ ID NO: 79406 - DNA, 25 bp, Homo sapiens
tggtctcacttcctttgggatcatg

SEQ ID NO: 79407 - DNA, 25 bp, Homo sapiens
catgagctagccagtgtaattaccc

SEQ ID NO: 79408 - DNA, 25 bp, Homo sapiens
tcaccggtaggcatatgattaagtc

SEQ ID NO: 79409 - DNA, 25 bp, Homo sapiens
gcccaagaaaggtgagcaaagcatc

SEQ ID NO: 79410 - DNA, 25 bp, Homo sapiens
ttataccattacttcgacctttttg

SEQ ID NO: 79411 - DNA, 25 bp, Homo sapiens
cccacccagggaagatgagtttctg

SEQ ID NO: 79412 - DNA, 25 bp, Homo sapiens
ttcgaaaccaggcaccagacaggca

SEQ ID NO: 79413 - DNA, 25 bp, Homo sapiens
gtcccagatggtgctgtgatttcaa

SEQ ID NO: 79414 - DNA, 25 bp, Homo sapiens
gagtgtccctatggtgcctctaaca

SEQ ID NO: 79415 - DNA, 25 bp, Homo sapiens
ccactgtagtgaactgctctctgta

SEQ ID NO: 79416 - DNA, 25 bp, Homo sapiens
caccttggggatggaatttggtcta

SEQ ID NO: 79417 - DNA, 25 bp, Homo sapiens
acccaggattgctttacagagagaa

SEQ ID NO: 79418 - DNA, 25 bp, Homo sapiens
ccggtcactgggttgctcattattc

SEQ ID NO: 79419 - DNA, 25 bp, Homo sapiens
tggtaggcacatatctcgggcatta

SEQ ID NO: 79420 - DNA, 25 bp, Homo sapiens
ctaggtcctgtgctggtgatacaaa

SEQ ID NO: 79421 - DNA, 25 bp, Homo sapiens
acacccttctatggccaaataattg

SEQ ID NO: 79422 - DNA, 25 bp, Homo sapiens
gatcctagcaatgtgtttgtgtgtg

SEQ ID NO: 79423 - DNA, 25 bp, Homo sapiens
tgtgactttcagtgctctgcccaga

SEQ ID NO: 79424 - DNA, 25 bp, Homo sapiens
tgccgtacccatgtagattgcaaca

SEQ ID NO: 79425 - DNA, 25 bp, Homo sapiens
gcctccctgttggtgctaacgtttc

SEQ ID NO: 79426 - DNA, 25 bp, Homo sapiens
aacagatattaaagactaattttta

SEQ ID NO: 79427 - DNA, 25 bp, Homo sapiens
gtcatcattagactactcacaggtt

SEQ ID NO: 79428 - DNA, 25 bp, Homo sapiens
tagattaaaagatgttttagagatg

SEQ ID NO: 79429 - DNA, 25 bp, Homo sapiens
gtgccacttgccactatcaaaattg

SEQ ID NO: 79430 - DNA, 25 bp, Homo sapiens
gccgggcaatgtgcaactaggtgta

SEQ ID NO: 79431 - DNA, 25 bp, Homo sapiens
cagacatgaccctcagtgtgggata

SEQ ID NO: 79432 - DNA, 25 bp, Homo sapiens
ttctccagaggagctcagcagccta

SEQ ID NO: 79433 - DNA, 25 bp, Homo sapiens
ctgggagccaccaaaaggctttata

SEQ ID NO: 79434 - DNA, 25 bp, Homo sapiens
aacagcaatggtttccactgcaact

SEQ ID NO: 79435 - DNA, 25 bp, Homo sapiens
cccacctgattgatgaggcagcatc

SEQ ID NO: 79436 - DNA, 25 bp, Homo sapiens
tgtgcacacagaggactgaggttta

SEQ ID NO: 79437 - DNA, 25 bp, Homo sapiens
tgccagacctgagacgccttaattc

SEQ ID NO: 79438 - DNA, 25 bp, Homo sapiens
cgcgcgtgttgcatgcactgttaga

SEQ ID NO: 79439 - DNA, 25 bp, Homo sapiens
acacgccacctgagtattatgatgc

SEQ ID NO: 79440 - DNA, 25 bp, Homo sapiens
cctctgggcctacagacaagttttc

SEQ ID NO: 79441 - DNA, 25 bp, Homo sapiens
caggcctctgtgaacaccatgtgtc

SEQ ID NO: 79442 - DNA, 25 bp, Homo sapiens
agtgacccagggacaactgtttata

SEQ ID NO: 79443 - DNA, 25 bp, Homo sapiens
ccgcgattaagatgccagatggtta

SEQ ID NO: 79444 - DNA, 25 bp, Homo sapiens
ggtggtgccagataaacaacagata

SEQ ID NO: 79445 - DNA, 25 bp, Homo sapiens
gggaggctagaatattcagactttc

SEQ ID NO: 79446 - DNA, 25 bp, Homo sapiens
cactatgtggctgctcacgagctta

SEQ ID NO: 79447 - DNA, 25 bp, Homo sapiens
tccctggttgggaagaaaaatctta

SEQ ID NO: 79448 - DNA, 25 bp, Homo sapiens
gcctgggtacagagagaagctttca

SEQ ID NO: 79449 - DNA, 25 bp, Homo sapiens
gcacagagagccactagccagttta

SEQ ID NO: 79450 - DNA, 25 bp, Homo sapiens
ggtgaaacattgattacaggtattg

SEQ ID NO: 79451 - DNA, 25 bp, Homo sapiens
ataatacagtctgtgacttctatat

SEQ ID NO: 79452 - DNA, 25 bp, Homo sapiens
caagaagaagaatggcagttgctca

SEQ ID NO: 79453 - DNA, 25 bp, Homo sapiens
ctccagtgagctttaggtcaatttc

SEQ ID NO: 79454 - DNA, 25 bp, Homo sapiens
gaacattatcttactgaggcggtga

SEQ ID NO: 79455 - DNA, 25 bp, Homo sapiens
agccaacttgtgtaggataatccca

SEQ ID NO: 79456 - DNA, 25 bp, Homo sapiens
ccagggatctgctgttgaacttaca

SEQ ID NO: 79457 - DNA, 25 bp, Homo sapiens
cactgggatttggagaactgcttta

SEQ ID NO: 79458 - DNA, 25 bp, Homo sapiens
tggctttgactaattctggtactga

SEQ ID NO: 79459 - DNA, 25 bp, Homo sapiens
agtgtgccgcaaacttctctagagg

SEQ ID NO: 79460 - DNA, 25 bp, Homo sapiens
gagaaatgagtattaagtattttaa

SEQ ID NO: 79461 - DNA, 25 bp, Homo sapiens
ccaaaatgtagattatttaaatgac

SEQ ID NO: 79462 - DNA, 25 bp, Homo sapiens
tgggcaagaagcttcacaacgtcta

SEQ ID NO: 79463 - DNA, 25 bp, Homo sapiens
tggccctaaaccgatgctacaaacc

SEQ ID NO: 79464 - DNA, 25 bp, Homo sapiens
cccaagatgatggaagcgtgtatta

SEQ ID NO: 79465 - DNA, 25 bp, Homo sapiens
aggaacctagtattacccagttaga

SEQ ID NO: 79466 - DNA, 25 bp, Homo sapiens
ttccggaaggtaagtgtcatagctc

SEQ ID NO: 79467 - DNA, 25 bp, Homo sapiens
ccctccagggcttctatgtaacatt

SEQ ID NO: 79468 - DNA, 25 bp, Homo sapiens
atcaaccctttctctgtgtgtagta

SEQ ID NO: 79469 - DNA, 25 bp, Homo sapiens
ccctccttggttggacaaacacata

SEQ ID NO: 79470 - DNA, 25 bp, Homo sapiens
catggtgctaccagctgaatattca

SEQ ID NO: 79471 - DNA, 25 bp, Homo sapiens
acagtttcttcttcatgcgtggaca

SEQ ID NO: 79472 - DNA, 25 bp, Homo sapiens
ggctggagaaccctgaatgtataaa

SEQ ID NO: 79473 - DNA, 25 bp, Homo sapiens
attgcagccatgaaaagaccctttt

SEQ ID NO: 79474 - DNA, 25 bp, Homo sapiens
gcttggctcataaaaggcacttgta

SEQ ID NO: 79475 - DNA, 25 bp, Homo sapiens
agggtccaggtcacttttttcacag

SEQ ID NO: 79476 - DNA, 25 bp, Homo sapiens
ggacttctgtttctcttcacatgta

SEQ ID NO: 79477 - DNA, 25 bp, Homo sapiens
tctaccacagcaggcaaaagccaga

SEQ ID NO: 79478 - DNA, 25 bp, Homo sapiens
gaggggctgactcaatctcagaata

SEQ ID NO: 79479 - DNA, 25 bp, Homo sapiens
gtgatggtctcaagtagtagctgtg

SEQ ID NO: 79480 - DNA, 25 bp, Homo sapiens
aactataaatagaacaaaaacgtag

SEQ ID NO: 79481 - DNA, 25 bp, Homo sapiens
taggtccattcagcccacaagtatc

SEQ ID NO: 79482 - DNA, 25 bp, Homo sapiens
tcccaagggaaatgacaactaagtc

SEQ ID NO: 79483 - DNA, 25 bp, Homo sapiens
gcctggctaatgcttgctcctacaa

SEQ ID NO: 79484 - DNA, 25 bp, Homo sapiens
tgaaaatgacatcctaccatctctg

SEQ ID NO: 79485 - DNA, 25 bp, Homo sapiens
ggccagccagcttgtcttttttatg

SEQ ID NO: 79486 - DNA, 25 bp, Homo sapiens
cactgtcggctagttgaagaataca

SEQ ID NO: 79487 - DNA, 25 bp, Homo sapiens
tctatttttctttaatttagtaccg

SEQ ID NO: 79488 - DNA, 25 bp, Homo sapiens
tcccggggaagagtcttaatttgtc

SEQ ID NO: 79489 - DNA, 25 bp, Homo sapiens
gccctggccatgtctctttattgtc

SEQ ID NO: 79490 - DNA, 25 bp, Homo sapiens
gtgcccagtggacaggtcatcaata

SEQ ID NO: 79491 - DNA, 25 bp, Homo sapiens
ggcctcatctactggtctccacagg

SEQ ID NO: 79492 - DNA, 25 bp, Homo sapiens
gttgcttgcagcatggccctccaaa

SEQ ID NO: 79493 - DNA, 25 bp, Homo sapiens
ggtggtacataacacatgccaagca

SEQ ID NO: 79494 - DNA, 25 bp, Homo sapiens
ccgaagcctgggaccacttatttta

SEQ ID NO: 79495 - DNA, 25 bp, Homo sapiens
gaggcagaaggctagagtcattatc

SEQ ID NO: 79496 - DNA, 25 bp, Homo sapiens
tctagggcttcttggagacaggaca

SEQ ID NO: 79497 - DNA, 25 bp, Homo sapiens
cccaccagttattgttgctcagtca

SEQ ID NO: 79498 - DNA, 25 bp, Homo sapiens
aagcttcccatcacagttctaacaa

SEQ ID NO: 79499 - DNA, 25 bp, Homo sapiens
ggctgccacctccatagtaccaatg

SEQ ID NO: 79500 - DNA, 25 bp, Homo sapiens
tcagaggaaagtgctaggacaagtc

SEQ ID NO: 79501 - DNA, 25 bp, Homo sapiens
cccttgacttaactgctggggtata

SEQ ID NO: 79502 - DNA, 25 bp, Homo sapiens
tgggaatcttccctgtccttaagaa

SEQ ID NO: 79503 - DNA, 25 bp, Homo sapiens
aggtgacagattagcctcttgtttc

SEQ ID NO: 79504 - DNA, 25 bp, Homo sapiens
accgagggcattagttgtatttcac

SEQ ID NO: 79505 - DNA, 25 bp, Homo sapiens
tacaacgtgagtttaggccagaaca

SEQ ID NO: 79506 - DNA, 25 bp, Homo sapiens
gaacatgcctttttgactctacaga

SEQ ID NO: 79507 - DNA, 25 bp, Homo sapiens
taccggagctggaaaggcaattctg

SEQ ID NO: 79508 - DNA, 25 bp, Homo sapiens
ctggaaaggcaattctaagtgcata

SEQ ID NO: 79509 - DNA, 25 bp, Homo sapiens
tgcaagcgggtgtgaaaacttccta

SEQ ID NO: 79510 - DNA, 25 bp, Homo sapiens
gcttgataattcatgacagaacgtg

SEQ ID NO: 79511 - DNA, 25 bp, Homo sapiens
tacagatatacaggtatagatacag

SEQ ID NO: 79512 - DNA, 25 bp, Homo sapiens
tcctcttgtacggaacccacatgta

SEQ ID NO: 79513 - DNA, 25 bp, Homo sapiens
gctctagggcatgatcattagctca

SEQ ID NO: 79514 - DNA, 25 bp, Homo sapiens
tgcacaggccttcagtcaataaatt

SEQ ID NO: 79515 - DNA, 25 bp, Homo sapiens
ggaggagcatcacgtagacatcaga

SEQ ID NO: 79516 - DNA, 25 bp, Homo sapiens
ctgccaattttcacaggctgccttg

SEQ ID NO: 79517 - DNA, 25 bp, Homo sapiens
tggcccgttctgactgctctaatcc

SEQ ID NO: 79518 - DNA, 25 bp, Homo sapiens
ggagactcaattcctgtaaggctta

SEQ ID NO: 79519 - DNA, 25 bp, Homo sapiens
ggcaggactattactctccatgatg

SEQ ID NO: 79520 - DNA, 25 bp, Homo sapiens
gtgggggggaagaatcccaaataaa

SEQ ID NO: 79521 - DNA, 25 bp, Homo sapiens
cctcccacttgtttcttgtttcaga

SEQ ID NO: 79522 - DNA, 25 bp, Homo sapiens
cttgtgcctcgcatacaggtataga

SEQ ID NO: 79523 - DNA, 25 bp, Homo sapiens
tggcaactcaacagggatagacttc

SEQ ID NO: 79524 - DNA, 25 bp, Homo sapiens
ttgggatccctacactggtaagata

SEQ ID NO: 79525 - DNA, 25 bp, Homo sapiens
taagtgactccatatttgccaagtg

SEQ ID NO: 79526 - DNA, 25 bp, Homo sapiens
agcctgctcatgtgttctgtgtcca

SEQ ID NO: 79527 - DNA, 25 bp, Homo sapiens
ggtttctggctcctcctgatctgca

SEQ ID NO: 79528 - DNA, 25 bp, Homo sapiens
acctgctggaacctcactagaattg

SEQ ID NO: 79529 - DNA, 25 bp, Homo sapiens
cttaagggagttttgctatagaatc

SEQ ID NO: 79530 - DNA, 25 bp, Homo sapiens
cctctggcaggagccaataaagtta

SEQ ID NO: 79531 - DNA, 25 bp, Homo sapiens
agctatcagagtgcagtttaccaaa

SEQ ID NO: 79532 - DNA, 25 bp, Homo sapiens
gcctgtacctcaccgggacaaaatt

SEQ ID NO: 79533 - DNA, 25 bp, Homo sapiens
aggttccttctccacgtgcttttga

SEQ ID NO: 79534 - DNA, 25 bp, Homo sapiens
ccgcagcctggtgaccgtgaaaatc

SEQ ID NO: 79535 - DNA, 25 bp, Homo sapiens
tggcgcatgctggacagaaaacatt

SEQ ID NO: 79536 - DNA, 25 bp, Homo sapiens
gattggaagtattttgtgtagcaca

SEQ ID NO: 79537 - DNA, 25 bp, Homo sapiens
gtctaaggctcaggacagtcccaca

SEQ ID NO: 79538 - DNA, 25 bp, Homo sapiens
tttagcaagagctaagcagttattg

SEQ ID NO: 79539 - DNA, 25 bp, Homo sapiens
ggctggtgcttcctacttgcttgga

SEQ ID NO: 79540 - DNA, 25 bp, Homo sapiens
gacccaagtctttcctgtgcagtga

SEQ ID NO: 79541 - DNA, 25 bp, Homo sapiens
ttaccttggatacagcagcacattg

SEQ ID NO: 79542 - DNA, 25 bp, Homo sapiens
aagtgccttgttgctgtcacattta

SEQ ID NO: 79543 - DNA, 25 bp, Homo sapiens
tggctccagccacagcagtgtagtt

SEQ ID NO: 79544 - DNA, 25 bp, Homo sapiens
cgaggcagccactagcttcagagta

SEQ ID NO: 79545 - DNA, 25 bp, Homo sapiens
tggcagcaagatcagcatgtccctc

SEQ ID NO: 79546 - DNA, 25 bp, Homo sapiens
ttgcagtgaaacaactcccttgggc

SEQ ID NO: 79547 - DNA, 25 bp, Homo sapiens
gagcctccatgcataagtgaaattg

SEQ ID NO: 79548 - DNA, 25 bp, Homo sapiens
acctggttgacagagttccacctga

SEQ ID NO: 79549 - DNA, 25 bp, Homo sapiens
ctctggtaaacaaagggtgcccttc

SEQ ID NO: 79550 - DNA, 25 bp, Homo sapiens
ttagtccagccatcctagcaatgtc

SEQ ID NO: 79551 - DNA, 25 bp, Homo sapiens
gccaaaattttcattattctcaatt

SEQ ID NO: 79552 - DNA, 25 bp, Homo sapiens
gttcttttcagatttaactctaaat

SEQ ID NO: 79553 - DNA, 25 bp, Homo sapiens
ttgcccatgggctgatgtactcata

SEQ ID NO: 79554 - DNA, 25 bp, Homo sapiens
gcactttctgggcacataactattg

SEQ ID NO: 79555 - DNA, 25 bp, Homo sapiens
ggtgctgacaccttaattggcatca

SEQ ID NO: 79556 - DNA, 25 bp, Homo sapiens
acttatgggatactgcttaaaatga

SEQ ID NO: 79557 - DNA, 25 bp, Homo sapiens
agctgccagcatcgctatactatta

SEQ ID NO: 79558 - DNA, 25 bp, Homo sapiens
ccgtgtcccacttctgtcctttatg

SEQ ID NO: 79559 - DNA, 25 bp, Homo sapiens
ctgagtgagtgtcattttgccaaca

SEQ ID NO: 79560 - DNA, 25 bp, Homo sapiens
cacgtgccactttgtttagatgctc

SEQ ID NO: 79561 - DNA, 25 bp, Homo sapiens
attcccaacgtgtgtacagtctatg

SEQ ID NO: 79562 - DNA, 25 bp, Homo sapiens
gtgctccttctagctcaactttgtg

SEQ ID NO: 79563 - DNA, 25 bp, Homo sapiens
gttcctggcatataactaagcagtc

SEQ ID NO: 79564 - DNA, 25 bp, Homo sapiens
ggaactctctacactctggtattta

SEQ ID NO: 79565 - DNA, 25 bp, Homo sapiens
actgtgctttgtgattgtgccaaca

SEQ ID NO: 79566 - DNA, 25 bp, Homo sapiens
ttctcagggtcagggcgagcataat

SEQ ID NO: 79567 - DNA, 25 bp, Homo sapiens
cacgggtccacagttcgagttcaga

SEQ ID NO: 79568 - DNA, 25 bp, Homo sapiens
gccatgcgggcaaatctgagctttc

SEQ ID NO: 79569 - DNA, 25 bp, Homo sapiens
tcgagcccagggacccatctttatg

SEQ ID NO: 79570 - DNA, 25 bp, Homo sapiens
cccatttgattagaggtatgacctg

SEQ ID NO: 79571 - DNA, 25 bp, Homo sapiens
ctgcccagttcagtgcttcatattc

SEQ ID NO: 79572 - DNA, 25 bp, Homo sapiens
taatgacaaaaagaataaaagagtg

SEQ ID NO: 79573 - DNA, 25 bp, Homo sapiens
tctcttcagcattggggcctcatca

SEQ ID NO: 79574 - DNA, 25 bp, Homo sapiens
acagcacagtgctcgacatgagata

SEQ ID NO: 79575 - DNA, 25 bp, Homo sapiens
gctccttgggttctagattcttgca

SEQ ID NO: 79576 - DNA, 25 bp, Homo sapiens
atggcctattgttctttaagtctgc

SEQ ID NO: 79577 - DNA, 25 bp, Homo sapiens
ccgagatcttagcaggcccagagca

SEQ ID NO: 79578 - DNA, 25 bp, Homo sapiens
cctgcaacttaactgggaactgatc

SEQ ID NO: 79579 - DNA, 25 bp, Homo sapiens
ctgcactgaggtctaggtttctccc

SEQ ID NO: 79580 - DNA, 25 bp, Homo sapiens
ggaccctcgtctgctcaattgtaaa

SEQ ID NO: 79581 - DNA, 25 bp, Homo sapiens
tgtgcaaagtccttagctagtgatg

SEQ ID NO: 79582 - DNA, 25 bp, Homo sapiens
ggactgacaaatagccctggaactg

SEQ ID NO: 79583 - DNA, 25 bp, Homo sapiens
acctcatgggcttggagttgacaca

SEQ ID NO: 79584 - DNA, 25 bp, Homo sapiens
cctgggcattgaacatagaagttac

SEQ ID NO: 79585 - DNA, 25 bp, Homo sapiens
agccagctggcttacagagcagtga

SEQ ID NO: 79586 - DNA, 25 bp, Homo sapiens
gttgcccatcagctagaaattactg

SEQ ID NO: 79587 - DNA, 25 bp, Homo sapiens
ccaaggcgtcgtcttagggacctaa

SEQ ID NO: 79588 - DNA, 25 bp, Homo sapiens
ttgggttcagacctctccagagatg

SEQ ID NO: 79589 - DNA, 25 bp, Homo sapiens
ttggttctgctcatcacacttgggg

SEQ ID NO: 79590 - DNA, 25 bp, Homo sapiens
agccctgacaggttctctagaagta

SEQ ID NO: 79591 - DNA, 25 bp, Homo sapiens
ccttcctggatgtaaactaatgtga

SEQ ID NO: 79592 - DNA, 25 bp, Homo sapiens
tcctccagtgggcttaatctctgtc

SEQ ID NO: 79593 - DNA, 25 bp, Homo sapiens
gcctgctttcttctggggatccttg

SEQ ID NO: 79594 - DNA, 25 bp, Homo sapiens
cttgaacctgtcttccctgggagtg

SEQ ID NO: 79595 - DNA, 25 bp, Homo sapiens
gtccctggatgatccctgtcaatta

SEQ ID NO: 79596 - DNA, 25 bp, Homo sapiens
gaggttaccagtgacatcccaatta

SEQ ID NO: 79597 - DNA, 25 bp, Homo sapiens
acttgtcaatattttgcctataata

SEQ ID NO: 79598 - DNA, 25 bp, Homo sapiens
tttagcatctccctataactgcagc

SEQ ID NO: 79599 - DNA, 25 bp, Homo sapiens
gggtgtcgtcaactcatgccggtta

SEQ ID NO: 79600 - DNA, 25 bp, Homo sapiens
agccgcctcagctgtcggagttcaa

SEQ ID NO: 79601 - DNA, 25 bp, Homo sapiens
cggtctccttttgtctccagctaga

SEQ ID NO: 79602 - DNA, 25 bp, Homo sapiens
cccagcctttttggccgcttgctta

SEQ ID NO: 79603 - DNA, 25 bp, Homo sapiens
ctgttggtgacgcattttagagcta

SEQ ID NO: 79604 - DNA, 25 bp, Homo sapiens
cttctggctatttggagatatctta

SEQ ID NO: 79605 - DNA, 25 bp, Homo sapiens
cccagagctgaggttgaaatttgtc

SEQ ID NO: 79606 - DNA, 25 bp, Homo sapiens
tgtagcggcacagcaagaaactcta

SEQ ID NO: 79607 - DNA, 25 bp, Homo sapiens
ggcctgtattcctcaaaatggtata

SEQ ID NO: 79608 - DNA, 25 bp, Homo sapiens
ctggtctgtcagcaaatctgctttc

SEQ ID NO: 79609 - DNA, 25 bp, Homo sapiens
acaggtgcctcaagtggattttcta

SEQ ID NO: 79610 - DNA, 25 bp, Homo sapiens
ctcctggcctgctggaacttacgta

SEQ ID NO: 79611 - DNA, 25 bp, Homo sapiens
tgacgtcaacttttctcctactgga

SEQ ID NO: 79612 - DNA, 25 bp, Homo sapiens
acttctcaggatagggctttcatta

SEQ ID NO: 79613 - DNA, 25 bp, Homo sapiens
ctctgactctgtaaagcaccttttt

SEQ ID NO: 79614 - DNA, 25 bp, Homo sapiens
cagaagttgttccatagagtgtaca

SEQ ID NO: 79615 - DNA, 25 bp, Homo sapiens
tgcctctctggaagtattaataatg

SEQ ID NO: 79616 - DNA, 25 bp, Homo sapiens
cacacacatttacttagggcagata

SEQ ID NO: 79617 - DNA, 25 bp, Homo sapiens
agcagttttgctgaaatcgaatata

SEQ ID NO: 79618 - DNA, 25 bp, Homo sapiens
ccaggctgtgggaaatatctttatc

SEQ ID NO: 79619 - DNA, 25 bp, Homo sapiens
tgggtccaccaaacctggctaagtc

SEQ ID NO: 79620 - DNA, 25 bp, Homo sapiens
caccagtgacagttgggccctctga

SEQ ID NO: 79621 - DNA, 25 bp, Homo sapiens
ggtcttctaatctctgtgggctatg

SEQ ID NO: 79622 - DNA, 25 bp, Homo sapiens
tccgacatcctagtgttataaagcc

SEQ ID NO: 79623 - DNA, 25 bp, Homo sapiens
atctctgctggacttggaatctata

SEQ ID NO: 79624 - DNA, 25 bp, Homo sapiens
tggcctgctcatacaaaaatttctg

SEQ ID NO: 79625 - DNA, 25 bp, Homo sapiens
tcacttctgggttcgtggcacatca

SEQ ID NO: 79626 - DNA, 25 bp, Homo sapiens
tgtgcctggtttaccgtcttaatta

SEQ ID NO: 79627 - DNA, 25 bp, Homo sapiens
gcatttagtcccatagctggtctta

SEQ ID NO: 79628 - DNA, 25 bp, Homo sapiens
ctactcgttgtatcttgcttgggaa

SEQ ID NO: 79629 - DNA, 25 bp, Homo sapiens
aatgtgctctgcatttgacaaggtc

SEQ ID NO: 79630 - DNA, 25 bp, Homo sapiens
tcctagctgggccaaaaagtattcc

SEQ ID NO: 79631 - DNA, 25 bp, Homo sapiens
cctgggaggctgctgacaataaaaa

SEQ ID NO: 79632 - DNA, 25 bp, Homo sapiens
agctcctttaactgttgggttgcca

SEQ ID NO: 79633 - DNA, 25 bp, Homo sapiens
cacaggcttcacttttgggaaaata

SEQ ID NO: 79634 - DNA, 25 bp, Homo sapiens
gatggtgccctttgtttctgcagta

SEQ ID NO: 79635 - DNA, 25 bp, Homo sapiens
ttctcctggcaccttggcaaagatg

SEQ ID NO: 79636 - DNA, 25 bp, Homo sapiens
gggatataatgggatcatcactagg

SEQ ID NO: 79637 - DNA, 25 bp, Homo sapiens
tgccctcctgaattgtgtgtgtgta

SEQ ID NO: 79638 - DNA, 25 bp, Homo sapiens
ctctttgacacgacttggcatcttt

SEQ ID NO: 79639 - DNA, 25 bp, Homo sapiens
tgtggccttatactagaccctgtca

SEQ ID NO: 79640 - DNA, 25 bp, Homo sapiens
agccgcattggccatcaggaactga

SEQ ID NO: 79641 - DNA, 25 bp, Homo sapiens
accctgctaagtcttgtctctctga

SEQ ID NO: 79642 - DNA, 25 bp, Homo sapiens
gcaagccttttaggactcactcata

SEQ ID NO: 79643 - DNA, 25 bp, Homo sapiens
cttccaggttttgtccggatgatta

SEQ ID NO: 79644 - DNA, 25 bp, Homo sapiens
cagatggcctggtgacttgtagttc

SEQ ID NO: 79645 - DNA, 25 bp, Homo sapiens
caatcttgctttcttgggtagcata

SEQ ID NO: 79646 - DNA, 25 bp, Homo sapiens
ttggcctcgcttcattcattctctg

SEQ ID NO: 79647 - DNA, 25 bp, Homo sapiens
tgctcagccttgatatctgcattta

SEQ ID NO: 79648 - DNA, 25 bp, Homo sapiens
cacttttctgttttgggcctcagta

SEQ ID NO: 79649 - DNA, 25 bp, Homo sapiens
ctaccctaaggtttcagcagtgcca

SEQ ID NO: 79650 - DNA, 25 bp, Homo sapiens
acatgccttggaattcagtttgcta

SEQ ID NO: 79651 - DNA, 25 bp, Homo sapiens
acactgtggtgtagtcatgcattgc

SEQ ID NO: 79652 - DNA, 25 bp, Homo sapiens
gcccaccaaaacgtaacagatgagt

SEQ ID NO: 79653 - DNA, 25 bp, Homo sapiens
ctagctcttgattgtgaatattcta

SEQ ID NO: 79654 - DNA, 25 bp, Homo sapiens
gctctgtggtctcttgctaccagta

SEQ ID NO: 79655 - DNA, 25 bp, Homo sapiens
gagacaggtacccacacactacttg

SEQ ID NO: 79656 - DNA, 25 bp, Homo sapiens
tctctgcttgcttatgggtctgttc

SEQ ID NO: 79657 - DNA, 25 bp, Homo sapiens
ctcagctagtttctcgctccacaga

SEQ ID NO: 79658 - DNA, 25 bp, Homo sapiens
ctcttgagattgaaactgggacatt

SEQ ID NO: 79659 - DNA, 25 bp, Homo sapiens
ggcctggcttgtgagcaaaaactta

SEQ ID NO: 79660 - DNA, 25 bp, Homo sapiens
ggagagtccctgatatgctaccatt

SEQ ID NO: 79661 - DNA, 25 bp, Homo sapiens
taaggcatttcgcttctgctgaaga

SEQ ID NO: 79662 - DNA, 25 bp, Homo sapiens
ctcggcgttagtactaggaaactta

SEQ ID NO: 79663 - DNA, 25 bp, Homo sapiens
gtgtactgtactagctttgcaatta

SEQ ID NO: 79664 - DNA, 25 bp, Homo sapiens
gggaattaactcactgcctcttcag

SEQ ID NO: 79665 - DNA, 25 bp, Homo sapiens
tacccatagtggttctcaggccaca

SEQ ID NO: 79666 - DNA, 25 bp, Homo sapiens
tgactgttgccctaccaccatatta

SEQ ID NO: 79667 - DNA, 25 bp, Homo sapiens
tagagcctttacaaacctgagagtg

SEQ ID NO: 79668 - DNA, 25 bp, Homo sapiens
ctcatgtctttctttacagctacta

SEQ ID NO: 79669 - DNA, 25 bp, Homo sapiens
gagctctttgcatcttctttccttg

SEQ ID NO: 79670 - DNA, 25 bp, Homo sapiens
gctgggatgctgtaaggcagaaatc

SEQ ID NO: 79671 - DNA, 25 bp, Homo sapiens
ctcctccaatgatgcgttctgcttg

SEQ ID NO: 79672 - DNA, 25 bp, Homo sapiens
cacgttctgttttcagccgcttcta

SEQ ID NO: 79673 - DNA, 25 bp, Homo sapiens
caatccctcctccaccctttctaga

SEQ ID NO: 79674 - DNA, 25 bp, Homo sapiens
cccaccaggcgcttaaaacttgttg

SEQ ID NO: 79675 - DNA, 25 bp, Homo sapiens
tatgctgcatcctcaccctttgtgg

SEQ ID NO: 79676 - DNA, 25 bp, Homo sapiens
cccacagctggtagaagtttttgaa

SEQ ID NO: 79677 - DNA, 25 bp, Homo sapiens
cagcagattctgcatgacaataata

SEQ ID NO: 79678 - DNA, 25 bp, Homo sapiens
ctgggacttaaatttaggtgagaac

SEQ ID NO: 79679 - DNA, 25 bp, Homo sapiens
tgggctacgcgtacattatactttg

SEQ ID NO: 79680 - DNA, 25 bp, Homo sapiens
gctccctgaggctttacaaattgta

SEQ ID NO: 79681 - DNA, 25 bp, Homo sapiens
ccagattctgggctacttgctatta

SEQ ID NO: 79682 - DNA, 25 bp, Homo sapiens
gaccagtaaatcaaaagccagagtt

SEQ ID NO: 79683 - DNA, 25 bp, Homo sapiens
tgcctgaatagcaacccaaaatcta

SEQ ID NO: 79684 - DNA, 25 bp, Homo sapiens
tacgagtgtcagagtgcccttcaac

SEQ ID NO: 79685 - DNA, 25 bp, Homo sapiens
cccaggccaggcgtaatcattaagg

SEQ ID NO: 79686 - DNA, 25 bp, Homo sapiens
ttgccagttgtagcccagactcttc

SEQ ID NO: 79687 - DNA, 25 bp, Homo sapiens
gagaccactgtatatatgaccaagg

SEQ ID NO: 79688 - DNA, 25 bp, Homo sapiens
gtctctgccgtttggtccctattta

SEQ ID NO: 79689 - DNA, 25 bp, Homo sapiens
gttgggctcactaggcattaaaata

SEQ ID NO: 79690 - DNA, 25 bp, Homo sapiens
agccaaagagagactagtagccagc

SEQ ID NO: 79691 - DNA, 25 bp, Homo sapiens
ccaggccttattgggatgaagttca

SEQ ID NO: 79692 - DNA, 25 bp, Homo sapiens
gtcatcctacattggcacagagttg

SEQ ID NO: 79693 - DNA, 25 bp, Homo sapiens
gcctaagtgtgcttccagactgaca

SEQ ID NO: 79694 - DNA, 25 bp, Homo sapiens
catggctacccttgtctgttattca

SEQ ID NO: 79695 - DNA, 25 bp, Homo sapiens
ctggaactttcctatagtgctgcta

SEQ ID NO: 79696 - DNA, 25 bp, Homo sapiens
tgtcctttctccatggctgctgatg

SEQ ID NO: 79697 - DNA, 25 bp, Homo sapiens
ggccatggaccaaggacagaacata

SEQ ID NO: 79698 - DNA, 25 bp, Homo sapiens
gggcagtatatttcaagcttcttca

SEQ ID NO: 79699 - DNA, 25 bp, Homo sapiens
agcagcctctgaatgtgggaatcta

SEQ ID NO: 79700 - DNA, 25 bp, Homo sapiens
gttcctagtgctgttgtggctttta

SEQ ID NO: 79701 - DNA, 25 bp, Homo sapiens
tttaaaggacaaggggcagcacttc

SEQ ID NO: 79702 - DNA, 25 bp, Homo sapiens
ggccctttctcagaggtgaacaatg

SEQ ID NO: 79703 - DNA, 25 bp, Homo sapiens
ggactcttgtcaaacacctttaatt

SEQ ID NO: 79704 - DNA, 25 bp, Homo sapiens
ttgtgtgtccgaacagtgtattttg

SEQ ID NO: 79705 - DNA, 25 bp, Homo sapiens
cctgtcaccagtgtaaggctgaata

SEQ ID NO: 79706 - DNA, 25 bp, Homo sapiens
gatagcgtctgtcttcatggattta

SEQ ID NO: 79707 - DNA, 25 bp, Homo sapiens
aggccatgctatagagaactatctg

SEQ ID NO: 79708 - DNA, 25 bp, Homo sapiens
ccctcctaaaggtgctgtgagatta

SEQ ID NO: 79709 - DNA, 25 bp, Homo sapiens
gaagcacttacccactagagcctag

SEQ ID NO: 79710 - DNA, 25 bp, Homo sapiens
agtgggattctgtgcctattgtaga

SEQ ID NO: 79711 - DNA, 25 bp, Homo sapiens
ggttccagctcttgctctgaaattg

SEQ ID NO: 79712 - DNA, 25 bp, Homo sapiens
gtgagattgccagtattgttccata

SEQ ID NO: 79713 - DNA, 25 bp, Homo sapiens
tgcgtctcccttactctcactgttg

SEQ ID NO: 79714 - DNA, 25 bp, Homo sapiens
gcagttcttactagctttaccagga

SEQ ID NO: 79715 - DNA, 25 bp, Homo sapiens
tccttagctttggtgactgggagtc

SEQ ID NO: 79716 - DNA, 25 bp, Homo sapiens
ccaggggagaaaaagtgctagcttc

SEQ ID NO: 79717 - DNA, 25 bp, Homo sapiens
tgcctgtgggtgtaaagatgctctc

SEQ ID NO: 79718 - DNA, 25 bp, Homo sapiens
aaggccctttattgtctctgaaaca

SEQ ID NO: 79719 - DNA, 25 bp, Homo sapiens
ccttagttgggcctttggagagcta

SEQ ID NO: 79720 - DNA, 25 bp, Homo sapiens
tctgcagttttggtggaaattttcc

SEQ ID NO: 79721 - DNA, 25 bp, Homo sapiens
tgaactccctttgctttaactcttg

SEQ ID NO: 79722 - DNA, 25 bp, Homo sapiens
ttgctgctattgtccatgcgtaaga

SEQ ID NO: 79723 - DNA, 25 bp, Homo sapiens
ttgtgcctcatctcagcagcatatg

SEQ ID NO: 79724 - DNA, 25 bp, Homo sapiens
ctttactacttattggccgttggca

SEQ ID NO: 79725 - DNA, 25 bp, Homo sapiens
ggccaaagtcaaccatccgtagata

SEQ ID NO: 79726 - DNA, 25 bp, Homo sapiens
ggcagctcttttgatgaattcctga

SEQ ID NO: 79727 - DNA, 25 bp, Homo sapiens
actgggagccagaagcaattgtatg

SEQ ID NO: 79728 - DNA, 25 bp, Homo sapiens
ccctggaaggcaaagcaagttctgt

SEQ ID NO: 79729 - DNA, 25 bp, Homo sapiens
gtcttccctgttggagcctcattga

SEQ ID NO: 79730 - DNA, 25 bp, Homo sapiens
cttggtacaaggcatactgatgagc

SEQ ID NO: 79731 - DNA, 25 bp, Homo sapiens
ggatttcccattgcctcaagttttg

SEQ ID NO: 79732 - DNA, 25 bp, Homo sapiens
ggcctttcatactcccacttttgta

SEQ ID NO: 79733 - DNA, 25 bp, Homo sapiens
atcacgttgtcctaggcagcttcta

SEQ ID NO: 79734 - DNA, 25 bp, Homo sapiens
atgctgcatggcaatatggtttatc

SEQ ID NO: 79735 - DNA, 25 bp, Homo sapiens
gtctgcattttctggcttgatttta

SEQ ID NO: 79736 - DNA, 25 bp, Homo sapiens
ccacaaattcgttaaggctgcttcc

SEQ ID NO: 79737 - DNA, 25 bp, Homo sapiens
gctgcagtgctccttatggtagttc

SEQ ID NO: 79738 - DNA, 25 bp, Homo sapiens
gtctctctcatgtgcttctaagtgg

SEQ ID NO: 79739 - DNA, 25 bp, Homo sapiens
tagaggcctgtaatctttgctatcc

SEQ ID NO: 79740 - DNA, 25 bp, Homo sapiens
gtcactcttgtattctccaaagttt

SEQ ID NO: 79741 - DNA, 25 bp, Homo sapiens
tggactcccaagtgcgacaatatta

SEQ ID NO: 79742 - DNA, 25 bp, Homo sapiens
accatggaccctctagttgttaaga

SEQ ID NO: 79743 - DNA, 25 bp, Homo sapiens
agggtctcattgctcaggcttcaaa

SEQ ID NO: 79744 - DNA, 25 bp, Homo sapiens
agactacatgttggttagcctcaca

SEQ ID NO: 79745 - DNA, 25 bp, Homo sapiens
ggcccagttataatctctcagcgtc

SEQ ID NO: 79746 - DNA, 25 bp, Homo sapiens
gaaaaatcacttttaataaagttcg

SEQ ID NO: 79747 - DNA, 25 bp, Homo sapiens
gcctgcccagcggttggattattga

SEQ ID NO: 79748 - DNA, 25 bp, Homo sapiens
tgctggcttcactaacaagtaatgg

SEQ ID NO: 79749 - DNA, 25 bp, Homo sapiens
tccctcttgtggtggaatacttaca

SEQ ID NO: 79750 - DNA, 25 bp, Homo sapiens
aactggttttgttctctgtcaatga

SEQ ID NO: 79751 - DNA, 25 bp, Homo sapiens
tggtctagtgtctgaggaaagtccc

SEQ ID NO: 79752 - DNA, 25 bp, Homo sapiens
tctgccaaaggggattgtagcattt

SEQ ID NO: 79753 - DNA, 25 bp, Homo sapiens
tctgccatggactgctatttataca

SEQ ID NO: 79754 - DNA, 25 bp, Homo sapiens
agtgcccatgctgaagtagagttta

SEQ ID NO: 79755 - DNA, 25 bp, Homo sapiens
tgcataccttgaaaggaagccatta

SEQ ID NO: 79756 - DNA, 25 bp, Homo sapiens
ttggatctctatactggacaggctc

SEQ ID NO: 79757 - DNA, 25 bp, Homo sapiens
ccttctaaggggttccaggtacata

SEQ ID NO: 79758 - DNA, 25 bp, Homo sapiens
gtgggccttaacttctccaagcatg

SEQ ID NO: 79759 - DNA, 25 bp, Homo sapiens
tgggaagacgtgagacaccatttta

SEQ ID NO: 79760 - DNA, 25 bp, Homo sapiens
gctccgttaaatgactgatcgattg

SEQ ID NO: 79761 - DNA, 25 bp, Homo sapiens
aggctcttgagttcccttgaggatc

SEQ ID NO: 79762 - DNA, 25 bp, Homo sapiens
tggcttcagggttcaactcattatc

SEQ ID NO: 79763 - DNA, 25 bp, Homo sapiens
gctgttagctgccaaagccctcatc

SEQ ID NO: 79764 - DNA, 25 bp, Homo sapiens
gcaaccacgtgtaaagcccagtcta

SEQ ID NO: 79765 - DNA, 25 bp, Homo sapiens
ataatatttccactgctaatattac

SEQ ID NO: 79766 - DNA, 25 bp, Homo sapiens
ccctacatgggaacagtctgtacta

SEQ ID NO: 79767 - DNA, 25 bp, Homo sapiens
acctagatacagatatatggttaaa

SEQ ID NO: 79768 - DNA, 25 bp, Homo sapiens
tatcaatacagaaatactttaaaac

SEQ ID NO: 79769 - DNA, 25 bp, Homo sapiens
tactcccttgatggtttcagcactc

SEQ ID NO: 79770 - DNA, 25 bp, Homo sapiens
tcaggaagccttctaggactaaaac

SEQ ID NO: 79771 - DNA, 25 bp, Homo sapiens
aaagctttggctctgtgtggtgaca

SEQ ID NO: 79772 - DNA, 25 bp, Homo sapiens
cttgtcattcattagcctgcaggta

SEQ ID NO: 79773 - DNA, 25 bp, Homo sapiens
ggcaggctggatccatgattttctc

SEQ ID NO: 79774 - DNA, 25 bp, Homo sapiens
gactcaccttatgggatcctgcatg

SEQ ID NO: 79775 - DNA, 25 bp, Homo sapiens
caaatggtcttttcaggcaaatgtc

SEQ ID NO: 79776 - DNA, 25 bp, Homo sapiens
ctcagttaggcaggctttagctcag

SEQ ID NO: 79777 - DNA, 25 bp, Homo sapiens
gggccatgcctctcccacttggatt

SEQ ID NO: 79778 - DNA, 25 bp, Homo sapiens
acctcaggggtgcttactaacactg

SEQ ID NO: 79779 - DNA, 25 bp, Homo sapiens
acccagttctttcaagctgtctgta

SEQ ID NO: 79780 - DNA, 25 bp, Homo sapiens
gttcccttttagctggctgatcatg

SEQ ID NO: 79781 - DNA, 25 bp, Homo sapiens
tgctctggatcacaccctgagtatc

SEQ ID NO: 79782 - DNA, 25 bp, Homo sapiens
ggggaagccctttactaatttaagt

SEQ ID NO: 79783 - DNA, 25 bp, Homo sapiens
cctctgcttcgctaagtgtgtctta

SEQ ID NO: 79784 - DNA, 25 bp, Homo sapiens
ccagcattagagagagcaggatttt

SEQ ID NO: 79785 - DNA, 25 bp, Homo sapiens
gaagtgtatgtatgttctgaccaga

SEQ ID NO: 79786 - DNA, 25 bp, Homo sapiens
cttggtggctcagggaaaacttata

SEQ ID NO: 79787 - DNA, 25 bp, Homo sapiens
tgttaagctcaatacccttgggata

SEQ ID NO: 79788 - DNA, 25 bp, Homo sapiens
ggaggaacacccacctacagctttg

SEQ ID NO: 79789 - DNA, 25 bp, Homo sapiens
ggctctacacagtggcctgagtata

SEQ ID NO: 79790 - DNA, 25 bp, Homo sapiens
agcaccaggccagtctttcccaaga

SEQ ID NO: 79791 - DNA, 25 bp, Homo sapiens
gtgtccgaagtactcccaagatgtg

SEQ ID NO: 79792 - DNA, 25 bp, Homo sapiens
aggtggcttcacatttcccaaaggg

SEQ ID NO: 79793 - DNA, 25 bp, Homo sapiens
tggcattactacgaacctgagcttc

SEQ ID NO: 79794 - DNA, 25 bp, Homo sapiens
catcctctaagcaacagtgtgtctc

SEQ ID NO: 79795 - DNA, 25 bp, Homo sapiens
ggggcgggtttgcttattccattta

SEQ ID NO: 79796 - DNA, 25 bp, Homo sapiens
cgtgccatgattgttcacctaaatg

SEQ ID NO: 79797 - DNA, 25 bp, Homo sapiens
cgacctccctcggtaagttagcaac

SEQ ID NO: 79798 - DNA, 25 bp, Homo sapiens
tgcctatcttgggactaagtcttcc

SEQ ID NO: 79799 - DNA, 25 bp, Homo sapiens
tgagaccttggtatagccgcattcc

SEQ ID NO: 79800 - DNA, 25 bp, Homo sapiens
cttggtgacctactttcagaacttc

SEQ ID NO: 79801 - DNA, 25 bp, Homo sapiens
gcagagtgtagccttcagcccattt

SEQ ID NO: 79802 - DNA, 25 bp, Homo sapiens
tcaggtttccagtagtccacagagc

SEQ ID NO: 79803 - DNA, 25 bp, Homo sapiens
tgctccaggccagcattcagtttga

SEQ ID NO: 79804 - DNA, 25 bp, Homo sapiens
agggaactctcctggactcttgatg

SEQ ID NO: 79805 - DNA, 25 bp, Homo sapiens
tgagcacaccatccttggctgatta

SEQ ID NO: 79806 - DNA, 25 bp, Homo sapiens
gcctggcaaacctcattaagtaatg

SEQ ID NO: 79807 - DNA, 25 bp, Homo sapiens
taggcagttgttcttcccaccaaaa

SEQ ID NO: 79808 - DNA, 25 bp, Homo sapiens
ttacgtagcaccttagaatccagcc

SEQ ID NO: 79809 - DNA, 25 bp, Homo sapiens
gggtaccatgttaagagcctgtcta

SEQ ID NO: 79810 - DNA, 25 bp, Homo sapiens
tgctgggctgccttctctttattta

SEQ ID NO: 79811 - DNA, 25 bp, Homo sapiens
ggtcttgccctttgctctcaccata

SEQ ID NO: 79812 - DNA, 25 bp, Homo sapiens
ccacagagtggttcttagtagtccc

SEQ ID NO: 79813 - DNA, 25 bp, Homo sapiens
acagacctggttggacttttacaga

SEQ ID NO: 79814 - DNA, 25 bp, Homo sapiens
ttccactggtggcataaaatcaagc

SEQ ID NO: 79815 - DNA, 25 bp, Homo sapiens
ccatgaggcttgactgagtaaggta

SEQ ID NO: 79816 - DNA, 25 bp, Homo sapiens
agtgttcagcttgtacccgcaaata

SEQ ID NO: 79817 - DNA, 25 bp, Homo sapiens
ggtctagtcagaggggtccaaattg

SEQ ID NO: 79818 - DNA, 25 bp, Homo sapiens
atgtgtaaagtaagttatctaatgg

SEQ ID NO: 79819 - DNA, 25 bp, Homo sapiens
gtgaaacgagtccaccacttgagtc

SEQ ID NO: 79820 - DNA, 25 bp, Homo sapiens
ttcctactcacagatgccaagtctg

SEQ ID NO: 79821 - DNA, 25 bp, Homo sapiens
aagaatgcccctctctctttccatc

SEQ ID NO: 79822 - DNA, 25 bp, Homo sapiens
gagggtcattcttacaggtccattc

SEQ ID NO: 79823 - DNA, 25 bp, Homo sapiens
gacagagtattcatcccaggggttg

SEQ ID NO: 79824 - DNA, 25 bp, Homo sapiens
tgaggacctcccgaaaatatcttgg

SEQ ID NO: 79825 - DNA, 25 bp, Homo sapiens
tgcttgaaattcacatgttgtttta

SEQ ID NO: 79826 - DNA, 25 bp, Homo sapiens
acacattgtttttaaagtaagaatc

SEQ ID NO: 79827 - DNA, 25 bp, Homo sapiens
caagaatttgggtttctggcctata

SEQ ID NO: 79828 - DNA, 25 bp, Homo sapiens
ccttgcacttccttccggtaactga

SEQ ID NO: 79829 - DNA, 25 bp, Homo sapiens
actggacctcagcactttttgtagc

SEQ ID NO: 79830 - DNA, 25 bp, Homo sapiens
ccatgcagtaggtatcaggtaaaca

SEQ ID NO: 79831 - DNA, 25 bp, Homo sapiens
gccatgatcccaggcttcaataaat

SEQ ID NO: 79832 - DNA, 25 bp, Homo sapiens
ttacaggagggctttaggacacttc

SEQ ID NO: 79833 - DNA, 25 bp, Homo sapiens
tcactctgagccactggagaatctg

SEQ ID NO: 79834 - DNA, 25 bp, Homo sapiens
ccactggtgtaagatttgccctcta

SEQ ID NO: 79835 - DNA, 25 bp, Homo sapiens
cctggggccatactttaagcacttc

SEQ ID NO: 79836 - DNA, 25 bp, Homo sapiens
ttgtcttgtcaaactagtcggaata

SEQ ID NO: 79837 - DNA, 25 bp, Homo sapiens
ctacccaggtggcaaaaggtccttc

SEQ ID NO: 79838 - DNA, 25 bp, Homo sapiens
cttggtcacgactttgcatagaaca

SEQ ID NO: 79839 - DNA, 25 bp, Homo sapiens
tagaatttgtaagtgtgggtgaaat

SEQ ID NO: 79840 - DNA, 25 bp, Homo sapiens
cctccactgtgggactgagaatttt

SEQ ID NO: 79841 - DNA, 25 bp, Homo sapiens
gttgaacctcttccttgctgccaag

SEQ ID NO: 79842 - DNA, 25 bp, Homo sapiens
cagcttgggctgagagcataaattc

SEQ ID NO: 79843 - DNA, 25 bp, Homo sapiens
tctttaggccgatagactacatttc

SEQ ID NO: 79844 - DNA, 25 bp, Homo sapiens
tgtcagtcttacgaacctccacgtg

SEQ ID NO: 79845 - DNA, 25 bp, Homo sapiens
taactcttcaaggatgtgcacaagc

SEQ ID NO: 79846 - DNA, 25 bp, Homo sapiens
catttcttgtggtgatgatagcctc

SEQ ID NO: 79847 - DNA, 25 bp, Homo sapiens
tctacccagagtcaaggggtctttc

SEQ ID NO: 79848 - DNA, 25 bp, Homo sapiens
gatcttgaacatgcatctgagtcta

SEQ ID NO: 79849 - DNA, 25 bp, Homo sapiens
ctcaggctgcttgctctaggaaaga

SEQ ID NO: 79850 - DNA, 25 bp, Homo sapiens
atggtaagcctatctctgactctga

SEQ ID NO: 79851 - DNA, 25 bp, Homo sapiens
ctggccctaaagtgtctaatgtaaa

SEQ ID NO: 79852 - DNA, 25 bp, Homo sapiens
acataactgtgggaacattctggga

SEQ ID NO: 79853 - DNA, 25 bp, Homo sapiens
ttactgcctcgtgactcctcttgga

SEQ ID NO: 79854 - DNA, 25 bp, Homo sapiens
cagtggtccgagctaattggttttc

SEQ ID NO: 79855 - DNA, 25 bp, Homo sapiens
gagtcgagctttcaacagatcttta

SEQ ID NO: 79856 - DNA, 25 bp, Homo sapiens
tgcgaatgttctcaagagtgtaggc

SEQ ID NO: 79857 - DNA, 25 bp, Homo sapiens
tggcaggaggtagtcatcaagcatc

SEQ ID NO: 79858 - DNA, 25 bp, Homo sapiens
cctgcctgactccaaacaatgggta

SEQ ID NO: 79859 - DNA, 25 bp, Homo sapiens
tggcggcaggcatttgactcccttt

SEQ ID NO: 79860 - DNA, 25 bp, Homo sapiens
agaaggcccttcagacccagataca

SEQ ID NO: 79861 - DNA, 25 bp, Homo sapiens
ttgtgcaagcttcagtccctacgtc

SEQ ID NO: 79862 - DNA, 25 bp, Homo sapiens
gtcccggacaagcacttaaatagtg

SEQ ID NO: 79863 - DNA, 25 bp, Homo sapiens
cactgtaacttggtatagaaaccta

SEQ ID NO: 79864 - DNA, 25 bp, Homo sapiens
ttgctattgccactactatcattga

SEQ ID NO: 79865 - DNA, 25 bp, Homo sapiens
ccgcaatggattgtgggtacctctg

SEQ ID NO: 79866 - DNA, 25 bp, Homo sapiens
cccttgaggccacactgagaaactg

SEQ ID NO: 79867 - DNA, 25 bp, Homo sapiens
gcttacagcagtatggatgggactc

SEQ ID NO: 79868 - DNA, 25 bp, Homo sapiens
ccacaacatgacgagtagagttttc

SEQ ID NO: 79869 - DNA, 25 bp, Homo sapiens
tactacgatccacctgtaaagagtg

SEQ ID NO: 79870 - DNA, 25 bp, Homo sapiens
atggcatgtccagctcataataggc

SEQ ID NO: 79871 - DNA, 25 bp, Homo sapiens
tgcagactgacttggaggagataca

SEQ ID NO: 79872 - DNA, 25 bp, Homo sapiens
ggcatgaatcaggtaacggccagta

SEQ ID NO: 79873 - DNA, 25 bp, Homo sapiens
gctgttctcttgtttgcccatggga

SEQ ID NO: 79874 - DNA, 25 bp, Homo sapiens
ctagcggagctcaggtaaaccattt

SEQ ID NO: 79875 - DNA, 25 bp, Homo sapiens
atctgagaaggctcttgctacttta

SEQ ID NO: 79876 - DNA, 25 bp, Homo sapiens
tgtgcctcctctctgctaatattga

SEQ ID NO: 79877 - DNA, 25 bp, Homo sapiens
agaggccctacagccagagcagttc

SEQ ID NO: 79878 - DNA, 25 bp, Homo sapiens
ctggttttacctacatgggctcatc

SEQ ID NO: 79879 - DNA, 25 bp, Homo sapiens
accaggccctgtgagaagatttaga

SEQ ID NO: 79880 - DNA, 25 bp, Homo sapiens
tgcaggctgtcacccacatatttga

SEQ ID NO: 79881 - DNA, 25 bp, Homo sapiens
acatgtcttctagtcctcggtaggc

SEQ ID NO: 79882 - DNA, 25 bp, Homo sapiens
gggtagagcctcaacctcattctta

SEQ ID NO: 79883 - DNA, 25 bp, Homo sapiens
agcgacgtgctacagcatacatttg

SEQ ID NO: 79884 - DNA, 25 bp, Homo sapiens
gtgagacccagaccagatgaatttc

SEQ ID NO: 79885 - DNA, 25 bp, Homo sapiens
tgtcatggttttccctctgcaaagc

SEQ ID NO: 79886 - DNA, 25 bp, Homo sapiens
tgtaataaacatatccttatacttc

SEQ ID NO: 79887 - DNA, 25 bp, Homo sapiens
aagctctgctctcccttttgttaga

SEQ ID NO: 79888 - DNA, 25 bp, Homo sapiens
gtcacgggcaatgtactcagcttca

SEQ ID NO: 79889 - DNA, 25 bp, Homo sapiens
ggggctactcttccttgagcttaca

SEQ ID NO: 79890 - DNA, 25 bp, Homo sapiens
gatgccacacctctgacttctgttg

SEQ ID NO: 79891 - DNA, 25 bp, Homo sapiens
gtaagcctggcatcaactctaattg

SEQ ID NO: 79892 - DNA, 25 bp, Homo sapiens
acgccgttgccatgtagtcatttta

SEQ ID NO: 79893 - DNA, 25 bp, Homo sapiens
tgagtccctacttgacgcttctgtg

SEQ ID NO: 79894 - DNA, 25 bp, Homo sapiens
ccaggaaggttctaggcataagcga

SEQ ID NO: 79895 - DNA, 25 bp, Homo sapiens
tgatcatttcctagcaggcagtttg

SEQ ID NO: 79896 - DNA, 25 bp, Homo sapiens
tgggttctgtctcactcgcataagc

SEQ ID NO: 79897 - DNA, 25 bp, Homo sapiens
ctaatactaataataaaaccatcta

SEQ ID NO: 79898 - DNA, 25 bp, Homo sapiens
ctccctctgtagtaatgtgcatcga

SEQ ID NO: 79899 - DNA, 25 bp, Homo sapiens
cctcatcctgcttttgcaaagttca

SEQ ID NO: 79900 - DNA, 25 bp, Homo sapiens
tgcagtgcaggtcactatctcttta

SEQ ID NO: 79901 - DNA, 25 bp, Homo sapiens
gcaaaccgcttttagtctctctaga

SEQ ID NO: 79902 - DNA, 25 bp, Homo sapiens
aattatctattggacagagccatgt

SEQ ID NO: 79903 - DNA, 25 bp, Homo sapiens
ccagtggtctagtcatctctcattg

SEQ ID NO: 79904 - DNA, 25 bp, Homo sapiens
tgttcaagtccctcagtcccatgta

SEQ ID NO: 79905 - DNA, 25 bp, Homo sapiens
tttcttgccctaggagagaccttta

SEQ ID NO: 79906 - DNA, 25 bp, Homo sapiens
ctggtggcccttaattgagctgaca

SEQ ID NO: 79907 - DNA, 25 bp, Homo sapiens
tccttcaagaggtaaaagccacgtg

SEQ ID NO: 79908 - DNA, 25 bp, Homo sapiens
agtactgacacagagaagttttctc

SEQ ID NO: 79909 - DNA, 25 bp, Homo sapiens
aacgctgtcctagagtgtgcaccta

SEQ ID NO: 79910 - DNA, 25 bp, Homo sapiens
tgggcagatctaccaccagttaaga

SEQ ID NO: 79911 - DNA, 25 bp, Homo sapiens
tcccgaggtcttgatcttaatgatg

SEQ ID NO: 79912 - DNA, 25 bp, Homo sapiens
caacaatggtgcttttctggcttta

SEQ ID NO: 79913 - DNA, 25 bp, Homo sapiens
agcatgccttacctgtgactacaaa

SEQ ID NO: 79914 - DNA, 25 bp, Homo sapiens
cttcctgtctttggtgtagtctaca

SEQ ID NO: 79915 - DNA, 25 bp, Homo sapiens
caatggattaagcaaaaataaaagc

SEQ ID NO: 79916 - DNA, 25 bp, Homo sapiens
cacaggactcaaagtacgaggattc

SEQ ID NO: 79917 - DNA, 25 bp, Homo sapiens
tgggctgaaatgtaaaaggcaactc

SEQ ID NO: 79918 - DNA, 25 bp, Homo sapiens
caggcattgtatctgagggtattta

SEQ ID NO: 79919 - DNA, 25 bp, Homo sapiens
acccgcatggtaaactgaaagctta

SEQ ID NO: 79920 - DNA, 25 bp, Homo sapiens
tggtggtttacctacccaacagcta

SEQ ID NO: 79921 - DNA, 25 bp, Homo sapiens
cacacttggctgcacctggaataca

SEQ ID NO: 79922 - DNA, 25 bp, Homo sapiens
gtgccttcccatcaagtaccatatg

SEQ ID NO: 79923 - DNA, 25 bp, Homo sapiens
ggtacaggccaattccacctagttg

SEQ ID NO: 79924 - DNA, 25 bp, Homo sapiens
tccaagaaggatagcactcacaata

SEQ ID NO: 79925 - DNA, 25 bp, Homo sapiens
ggccagggccaatgatctccactta

SEQ ID NO: 79926 - DNA, 25 bp, Homo sapiens
cctcctgggatgtgaccaacaaata

SEQ ID NO: 79927 - DNA, 25 bp, Homo sapiens
atatgcaataaataagtagaagttt

SEQ ID NO: 79928 - DNA, 25 bp, Homo sapiens
cctctcatttgcactggctactttg

SEQ ID NO: 79929 - DNA, 25 bp, Homo sapiens
ctctgagcatcattatttggtgaca

SEQ ID NO: 79930 - DNA, 25 bp, Homo sapiens
tctcaggaggccagtttgatattgc

SEQ ID NO: 79931 - DNA, 25 bp, Homo sapiens
cctgcgcattgacctattaaatatc

SEQ ID NO: 79932 - DNA, 25 bp, Homo sapiens
gggcccaatctcctcattctgaaac

SEQ ID NO: 79933 - DNA, 25 bp, Homo sapiens
tcagtttccacaccaagcagcagta

SEQ ID NO: 79934 - DNA, 25 bp, Homo sapiens
ttcatccagcaaatctgcccggcta

SEQ ID NO: 79935 - DNA, 25 bp, Homo sapiens
gatccctagacattttatactcttt

SEQ ID NO: 79936 - DNA, 25 bp, Homo sapiens
ggcaagacacggctaccagtaacta

SEQ ID NO: 79937 - DNA, 25 bp, Homo sapiens
cagctgtgtctttctcatttatgta

SEQ ID NO: 79938 - DNA, 25 bp, Homo sapiens
attaggctccgagaaaggcatttcc

SEQ ID NO: 79939 - DNA, 25 bp, Homo sapiens
ggcccatccttctaagctttttaca

SEQ ID NO: 79940 - DNA, 25 bp, Homo sapiens
tctaggctctccctttcaagtttgc

SEQ ID NO: 79941 - DNA, 25 bp, Homo sapiens
ggggccgactttcaccaatgcacta

SEQ ID NO: 79942 - DNA, 25 bp, Homo sapiens
gcatgcttctcatttccctcaagta

SEQ ID NO: 79943 - DNA, 25 bp, Homo sapiens
gttactgtttcagccagccgccata

SEQ ID NO: 79944 - DNA, 25 bp, Homo sapiens
gtgggactaccctgtcgctatagta

SEQ ID NO: 79945 - DNA, 25 bp, Homo sapiens
aggcatgccttattccttacgtatc

SEQ ID NO: 79946 - DNA, 25 bp, Homo sapiens
gagtgttccacgaaatccctagttg

SEQ ID NO: 79947 - DNA, 25 bp, Homo sapiens
ttgcctctgtttgagccctaagata

SEQ ID NO: 79948 - DNA, 25 bp, Homo sapiens
tgtcaccttctagtttgcgcatctg

SEQ ID NO: 79949 - DNA, 25 bp, Homo sapiens
taatcctggggcatgtggctttaca

SEQ ID NO: 79950 - DNA, 25 bp, Homo sapiens
acctgtattgctagtcctcatctga

SEQ ID NO: 79951 - DNA, 25 bp, Homo sapiens
gctaaacagtaggtgctggaccata

SEQ ID NO: 79952 - DNA, 25 bp, Homo sapiens
gtgtgtggggtatgtgtgtctgggc

SEQ ID NO: 79953 - DNA, 25 bp, Homo sapiens
caaatctccaactcatatagcataa

SEQ ID NO: 79954 - DNA, 25 bp, Homo sapiens
tggtcacgtcttcctccaactgaga

SEQ ID NO: 79955 - DNA, 25 bp, Homo sapiens
tcagcttgggtctacttaaagattc

SEQ ID NO: 79956 - DNA, 25 bp, Homo sapiens
cagctcttgaatgacctgtgccttc

SEQ ID NO: 79957 - DNA, 25 bp, Homo sapiens
tccagagagcccttaatcagtaatg

SEQ ID NO: 79958 - DNA, 25 bp, Homo sapiens
actggtcaaactgaaccctaaattg

SEQ ID NO: 79959 - DNA, 25 bp, Homo sapiens
gggtaactataacataaggcaatta

SEQ ID NO: 79960 - DNA, 25 bp, Homo sapiens
cacttctgaggtatgatagttcaca

SEQ ID NO: 79961 - DNA, 25 bp, Homo sapiens
ctccagtgttcgtgatccagtccta

SEQ ID NO: 79962 - DNA, 25 bp, Homo sapiens
aaatctgaaaatactgtcaattata

SEQ ID NO: 79963 - DNA, 25 bp, Homo sapiens
tggtgggacccaaaatctgcctgga

SEQ ID NO: 79964 - DNA, 25 bp, Homo sapiens
gtctccgcacatttccctaaaagta

SEQ ID NO: 79965 - DNA, 25 bp, Homo sapiens
gcccgaagctatagtggcatattta

SEQ ID NO: 79966 - DNA, 25 bp, Homo sapiens
agggttgctcccttcccacacatga

SEQ ID NO: 79967 - DNA, 25 bp, Homo sapiens
aggtaggtctactctggtttttatt

SEQ ID NO: 79968 - DNA, 25 bp, Homo sapiens
ggtgggtgcccatatccattgcctg

SEQ ID NO: 79969 - DNA, 25 bp, Homo sapiens
gggccctctctctaagtatgatgta

SEQ ID NO: 79970 - DNA, 25 bp, Homo sapiens
aggagggcaaatcagacaattacca

SEQ ID NO: 79971 - DNA, 25 bp, Homo sapiens
agggcatgatacttttgcaacctta

SEQ ID NO: 79972 - DNA, 25 bp, Homo sapiens
ctcactagttaatatagcagccacc

SEQ ID NO: 79973 - DNA, 25 bp, Homo sapiens
gtggaactttggttttaatctgtaa

SEQ ID NO: 79974 - DNA, 25 bp, Homo sapiens
agttttgcccttgtgtgttgtccca

SEQ ID NO: 79975 - DNA, 25 bp, Homo sapiens
ggaccttaataaacctgccatagaa

SEQ ID NO: 79976 - DNA, 25 bp, Homo sapiens
tagtcatcatagagcacctgcattc

SEQ ID NO: 79977 - DNA, 25 bp, Homo sapiens
ggaatttatgaagaatacagagcta

SEQ ID NO: 79978 - DNA, 25 bp, Homo sapiens
gcaggagaccagagattattacaga

SEQ ID NO: 79979 - DNA, 25 bp, Homo sapiens
gcttgctgacagctgcacctgagta

SEQ ID NO: 79980 - DNA, 25 bp, Homo sapiens
ggcagcctactgcacacaaggatca

SEQ ID NO: 79981 - DNA, 25 bp, Homo sapiens
gtttgctaatcccaaccagttcagg

SEQ ID NO: 79982 - DNA, 25 bp, Homo sapiens
aaagaatgcttagatgtgtgccagc

SEQ ID NO: 79983 - DNA, 25 bp, Homo sapiens
taaaataagatgatgaagtcatgaa

SEQ ID NO: 79984 - DNA, 25 bp, Homo sapiens
gccacctgtgctccttcgctaagtt

SEQ ID NO: 79985 - DNA, 25 bp, Homo sapiens
aatgtctacaaaagcaatgtacatt

SEQ ID NO: 79986 - DNA, 25 bp, Homo sapiens
tcctgctgagctccttatcaacata

SEQ ID NO: 79987 - DNA, 25 bp, Homo sapiens
ttatctgcgtgaaacctgcaatccc

SEQ ID NO: 79988 - DNA, 25 bp, Homo sapiens
cccaaggatagaggttttgtatcaa

SEQ ID NO: 79989 - DNA, 25 bp, Homo sapiens
atagttattcaaaatacacaaacag

SEQ ID NO: 79990 - DNA, 25 bp, Homo sapiens
ctccctcctgactggggcttttata

SEQ ID NO: 79991 - DNA, 25 bp, Homo sapiens
ggtggggctcttgcaattacattta

SEQ ID NO: 79992 - DNA, 25 bp, Homo sapiens
tccggctgagacagaataccagatg

SEQ ID NO: 79993 - DNA, 25 bp, Homo sapiens
gagagagttcctgccttcaagagtc

SEQ ID NO: 79994 - DNA, 25 bp, Homo sapiens
caccggggatgattctggagaactc

SEQ ID NO: 79995 - DNA, 25 bp, Homo sapiens
gccttgtttccctagagctagcttg

SEQ ID NO: 79996 - DNA, 25 bp, Homo sapiens
tgttgggaccaaccaccatcattac

SEQ ID NO: 79997 - DNA, 25 bp, Homo sapiens
tttgactcctttcaccttagggata

SEQ ID NO: 79998 - DNA, 25 bp, Homo sapiens
tgcccgcaggcattctttggttgta

SEQ ID NO: 79999 - DNA, 25 bp, Homo sapiens
caaactatatggatctggtggctac

SEQ ID NO: 80000 - DNA, 25 bp, Homo sapiens
cccaattatggggaagggttcctga

SEQ ID NO: 80001 - DNA, 25 bp, Homo sapiens
gccctgtcttaatcttgcatctgag

SEQ ID NO: 80002 - DNA, 25 bp, Homo sapiens
tgtaagtctgtctccctgtattgtg

SEQ ID NO: 80003 - DNA, 25 bp, Homo sapiens
agctaggtctgcactgtaatcttta

SEQ ID NO: 80004 - DNA, 25 bp, Homo sapiens
ggcctacatgtagatcttaccctgc

SEQ ID NO: 80005 - DNA, 25 bp, Homo sapiens
gaatgacttaccctctgcctgaatg

SEQ ID NO: 80006 - DNA, 25 bp, Homo sapiens
gacccagtgtggagcctttgactca

SEQ ID NO: 80007 - DNA, 25 bp, Homo sapiens
aggccatcctgctccatctgtagtg

SEQ ID NO: 80008 - DNA, 25 bp, Homo sapiens
caggtttcctgcaacctaccaaacc

SEQ ID NO: 80009 - DNA, 25 bp, Homo sapiens
gtggtgttacctacttttcaatgca

SEQ ID NO: 80010 - DNA, 25 bp, Homo sapiens
tgattcctcgtttccctaagtagta

SEQ ID NO: 80011 - DNA, 25 bp, Homo sapiens
tgggacaagccactagggagaccta

SEQ ID NO: 80012 - DNA, 25 bp, Homo sapiens
ggtgagcacatctttggtcccaaag

SEQ ID NO: 80013 - DNA, 25 bp, Homo sapiens
cagctgagaactatgaggcccaatt

SEQ ID NO: 80014 - DNA, 25 bp, Homo sapiens
cagaggcctttagcattcagtaatc

SEQ ID NO: 80015 - DNA, 25 bp, Homo sapiens
cctgtcaggcctccagtaatttaac

SEQ ID NO: 80016 - DNA, 25 bp, Homo sapiens
gctctttcttttgagacttacacta

SEQ ID NO: 80017 - DNA, 25 bp, Homo sapiens
gcctcaaggctcatgaacctatttg

SEQ ID NO: 80018 - DNA, 25 bp, Homo sapiens
aggccctctgacaactatagtgtta

SEQ ID NO: 80019 - DNA, 25 bp, Homo sapiens
gaggcctcaatgtctctaaggaaga

SEQ ID NO: 80020 - DNA, 25 bp, Homo sapiens
aatccttgctttctgttgggtcaca

SEQ ID NO: 80021 - DNA, 25 bp, Homo sapiens
gtcctcagggtattagcaactagcc

SEQ ID NO: 80022 - DNA, 25 bp, Homo sapiens
gtctaagggctagaagcagttctca

SEQ ID NO: 80023 - DNA, 25 bp, Homo sapiens
ctgttcccaatacacaacttagatg

SEQ ID NO: 80024 - DNA, 25 bp, Homo sapiens
ggggttctctacgtccttcacatct

SEQ ID NO: 80025 - DNA, 25 bp, Homo sapiens
acatcttgcaagctggccctaaatt

SEQ ID NO: 80026 - DNA, 25 bp, Homo sapiens
gtcaaagtcttcatgcagtagaata

SEQ ID NO: 80027 - DNA, 25 bp, Homo sapiens
tgtggaagttcccaaggccatttta

SEQ ID NO: 80028 - DNA, 25 bp, Homo sapiens
gctagataattccaagtatttgagg

SEQ ID NO: 80029 - DNA, 25 bp, Homo sapiens
aggcaggcgtctagttcaaaaccca

SEQ ID NO: 80030 - DNA, 25 bp, Homo sapiens
ctggcatgtgccttccttttcttgg

SEQ ID NO: 80031 - DNA, 25 bp, Homo sapiens
aaaatggctgcctatgggtcaatga

SEQ ID NO: 80032 - DNA, 25 bp, Homo sapiens
gtatcccttttcagagatgctagca

SEQ ID NO: 80033 - DNA, 25 bp, Homo sapiens
ggcaccgatggaaagaatgactgta

SEQ ID NO: 80034 - DNA, 25 bp, Homo sapiens
gtcagcatgaagaggagaaaccatc

SEQ ID NO: 80035 - DNA, 25 bp, Homo sapiens
gggcccagctctctgcctgagatta

SEQ ID NO: 80036 - DNA, 25 bp, Homo sapiens
catgcatacatagtggctttccttc

SEQ ID NO: 80037 - DNA, 25 bp, Homo sapiens
agcatggatttggagcgattaccta

SEQ ID NO: 80038 - DNA, 25 bp, Homo sapiens
aaggtctatatggttattttaggta

SEQ ID NO: 80039 - DNA, 25 bp, Homo sapiens
tgggtcccagatctaagcactgctg

SEQ ID NO: 80040 - DNA, 25 bp, Homo sapiens
ggctgccattatttgcttgagactg

SEQ ID NO: 80041 - DNA, 25 bp, Homo sapiens
ggagctcttcttcacagtctagtta

SEQ ID NO: 80042 - DNA, 25 bp, Homo sapiens
gggcttcaggggcaatatctttata

SEQ ID NO: 80043 - DNA, 25 bp, Homo sapiens
ccctctctgagggaaggaaatttca

SEQ ID NO: 80044 - DNA, 25 bp, Homo sapiens
cccagggagttcatcttatcatata

SEQ ID NO: 80045 - DNA, 25 bp, Homo sapiens
tgctgtcatacacaagcgtgagatc

SEQ ID NO: 80046 - DNA, 25 bp, Homo sapiens
tggggacaaccttaatacgactgca

SEQ ID NO: 80047 - DNA, 25 bp, Homo sapiens
tgtggacacctccaaactggtcttc

SEQ ID NO: 80048 - DNA, 25 bp, Homo sapiens
cccagttacctgtccacgtgtttta

SEQ ID NO: 80049 - DNA, 25 bp, Homo sapiens
gccagccttgtgaatctccagtgta

SEQ ID NO: 80050 - DNA, 25 bp, Homo sapiens
ccaactcagggtatgtgagctacca

SEQ ID NO: 80051 - DNA, 25 bp, Homo sapiens
cccttgccaatgactttacagacta

SEQ ID NO: 80052 - DNA, 25 bp, Homo sapiens
gaaccacagttttgcaatgcagtga

SEQ ID NO: 80053 - DNA, 25 bp, Homo sapiens
tgaggtatagtccataacacccttg

SEQ ID NO: 80054 - DNA, 25 bp, Homo sapiens
atccgtacccggaaaataccttctg

SEQ ID NO: 80055 - DNA, 25 bp, Homo sapiens
gcaggtcttcctttccaatttgtca

SEQ ID NO: 80056 - DNA, 25 bp, Homo sapiens
tgtactgtagaaacatttaggttta

SEQ ID NO: 80057 - DNA, 25 bp, Homo sapiens
ttctattcaataaataattcctgga

SEQ ID NO: 80058 - DNA, 25 bp, Homo sapiens
ttacgtagaatagaccaagtgcaca

SEQ ID NO: 80059 - DNA, 25 bp, Homo sapiens
gccacagggttcagcaaagcaacta

SEQ ID NO: 80060 - DNA, 25 bp, Homo sapiens
ttcccgggtggaagcttattcaata

SEQ ID NO: 80061 - DNA, 25 bp, Homo sapiens
gctaccctgggtaccaatgatcttg

SEQ ID NO: 80062 - DNA, 25 bp, Homo sapiens
tgaacatccattgccctcagggaag

SEQ ID NO: 80063 - DNA, 25 bp, Homo sapiens
cagccctgctgtctgagttgaaagc

SEQ ID NO: 80064 - DNA, 25 bp, Homo sapiens
ggttccagcatctccttctacaagg

SEQ ID NO: 80065 - DNA, 25 bp, Homo sapiens
tgcacccatcttcctgcaagttatg

SEQ ID NO: 80066 - DNA, 25 bp, Homo sapiens
gggaacgttagccactgagtacata

SEQ ID NO: 80067 - DNA, 25 bp, Homo sapiens
ctgggcgtcctaacttttctaaatg

SEQ ID NO: 80068 - DNA, 25 bp, Homo sapiens
acagccctttgatccctttagattc

SEQ ID NO: 80069 - DNA, 25 bp, Homo sapiens
cggttacaggaatggaaagctctta

SEQ ID NO: 80070 - DNA, 25 bp, Homo sapiens
gggtctcttttctcttgctgacatg

SEQ ID NO: 80071 - DNA, 25 bp, Homo sapiens
caccttgtgggcaccagaatctaca

SEQ ID NO: 80072 - DNA, 25 bp, Homo sapiens
ccataggcagcagggaagattttgt

SEQ ID NO: 80073 - DNA, 25 bp, Homo sapiens
cacagctattttccatccaggaggg

SEQ ID NO: 80074 - DNA, 25 bp, Homo sapiens
gcaattctttttaagactgcctttc

SEQ ID NO: 80075 - DNA, 25 bp, Homo sapiens
ggccagcaggatctcggtaagaatc

SEQ ID NO: 80076 - DNA, 25 bp, Homo sapiens
tcgagccctgggacacttgcttata

SEQ ID NO: 80077 - DNA, 25 bp, Homo sapiens
ctctggagttcaagcgcagcctata

SEQ ID NO: 80078 - DNA, 25 bp, Homo sapiens
ctgtggggtacgcttgttattatta

SEQ ID NO: 80079 - DNA, 25 bp, Homo sapiens
tcccttgagtcacatgtcctggctg

SEQ ID NO: 80080 - DNA, 25 bp, Homo sapiens
gaaggctttcgctatacctgcaaca

SEQ ID NO: 80081 - DNA, 25 bp, Homo sapiens
ttcaggtgaacatatcgggccattg

SEQ ID NO: 80082 - DNA, 25 bp, Homo sapiens
catggtgtgcctgttcttgtaattc

SEQ ID NO: 80083 - DNA, 25 bp, Homo sapiens
ggcttcctttgtcattcctaatatc

SEQ ID NO: 80084 - DNA, 25 bp, Homo sapiens
caagtttctttcagagtggacagtc

SEQ ID NO: 80085 - DNA, 25 bp, Homo sapiens
gtggcccattttctcccagccattg

SEQ ID NO: 80086 - DNA, 25 bp, Homo sapiens
gctagatttttccacctgtacgaga

SEQ ID NO: 80087 - DNA, 25 bp, Homo sapiens
acccgtggccagtaccatgctaaca

SEQ ID NO: 80088 - DNA, 25 bp, Homo sapiens
tggttcaactatgctccaccacagg

SEQ ID NO: 80089 - DNA, 25 bp, Homo sapiens
tattagttaaaaaaggatattaaac

SEQ ID NO: 80090 - DNA, 25 bp, Homo sapiens
gactgccatcagtctgctcatggta

SEQ ID NO: 80091 - DNA, 25 bp, Homo sapiens
acccagtccttctagttaaccagtg

SEQ ID NO: 80092 - DNA, 25 bp, Homo sapiens
ccaggtgtctgcttatcatagtgta

SEQ ID NO: 80093 - DNA, 25 bp, Homo sapiens
tatgggtaactagatgcctgagctc

SEQ ID NO: 80094 - DNA, 25 bp, Homo sapiens
ctctccagggaggaacataaccatc

SEQ ID NO: 80095 - DNA, 25 bp, Homo sapiens
atctgagttttcctagggcctaaca

SEQ ID NO: 80096 - DNA, 25 bp, Homo sapiens
acacttttcgggtagctatggcaac

SEQ ID NO: 80097 - DNA, 25 bp, Homo sapiens
gcacattgttgtaagccacctagga

SEQ ID NO: 80098 - DNA, 25 bp, Homo sapiens
ggtacccacggcatggcaaaaattg

SEQ ID NO: 80099 - DNA, 25 bp, Homo sapiens
cctacaactacgtgggcctggaata

SEQ ID NO: 80100 - DNA, 25 bp, Homo sapiens
gccatgctttgcagtctggagacca

SEQ ID NO: 80101 - DNA, 25 bp, Homo sapiens
tggagcaagctcatcctctcgttgg

SEQ ID NO: 80102 - DNA, 25 bp, Homo sapiens
tttttagcatgaaaaggcccgcata

SEQ ID NO: 80103 - DNA, 25 bp, Homo sapiens
atttctgccccaaaaattatttccg

SEQ ID NO: 80104 - DNA, 25 bp, Homo sapiens
agcaggcccatgtacgtgattcaga

SEQ ID NO: 80105 - DNA, 25 bp, Homo sapiens
cttttgtagccctgttaccagagta

SEQ ID NO: 80106 - DNA, 25 bp, Homo sapiens
tggcccagtcctgtccagtgaaaca

SEQ ID NO: 80107 - DNA, 25 bp, Homo sapiens
cctttgccctagataagccctaatg

SEQ ID NO: 80108 - DNA, 25 bp, Homo sapiens
cctccagttctgaacttaaggaatc

SEQ ID NO: 80109 - DNA, 25 bp, Homo sapiens
aaacctgaaatatatttggaaactc

SEQ ID NO: 80110 - DNA, 25 bp, Homo sapiens
aggagccatgggagagagggtgggg

SEQ ID NO: 80111 - DNA, 25 bp, Homo sapiens
gctctgccagctctcaccaatgtta

SEQ ID NO: 80112 - DNA, 25 bp, Homo sapiens
gctagtatgcatctgtccacattga

SEQ ID NO: 80113 - DNA, 25 bp, Homo sapiens
gtgttccagctgaataatgtagctt

SEQ ID NO: 80114 - DNA, 25 bp, Homo sapiens
gcttcctacttttgggctaagatta

SEQ ID NO: 80115 - DNA, 25 bp, Homo sapiens
acaactccaggttttgtggcccata

SEQ ID NO: 80116 - DNA, 25 bp, Homo sapiens
ctccacagtttaaaggttgctatca

SEQ ID NO: 80117 - DNA, 25 bp, Homo sapiens
tctcgcacgcaactgggaaaaatgg

SEQ ID NO: 80118 - DNA, 25 bp, Homo sapiens
aatgccaggctatgttcacgtgacc

SEQ ID NO: 80119 - DNA, 25 bp, Homo sapiens
tggccgtgctaagtgctcacatact

SEQ ID NO: 80120 - DNA, 25 bp, Homo sapiens
aggttcctagcctctcccagtatga

SEQ ID NO: 80121 - DNA, 25 bp, Homo sapiens
tgctatagtcgaggagtcaaaattg

SEQ ID NO: 80122 - DNA, 25 bp, Homo sapiens
tgatgttttcacttaccgtccagga

SEQ ID NO: 80123 - DNA, 25 bp, Homo sapiens
cctaggtgtgagatgtgaacatacc

SEQ ID NO: 80124 - DNA, 25 bp, Homo sapiens
gggtcaactcctgtgttcgaaaatg

SEQ ID NO: 80125 - DNA, 25 bp, Homo sapiens
cccgtcttcaggaaaggtggctaca

SEQ ID NO: 80126 - DNA, 25 bp, Homo sapiens
ctagagtcccatttcaacgcactga

SEQ ID NO: 80127 - DNA, 25 bp, Homo sapiens
cacatctaaattggtacatgaatac

SEQ ID NO: 80128 - DNA, 25 bp, Homo sapiens
agggtctgcagctttcgtcctgaaa

SEQ ID NO: 80129 - DNA, 25 bp, Homo sapiens
gtccacagcagttgttcccaaaatg

SEQ ID NO: 80130 - DNA, 25 bp, Homo sapiens
ggtcctgggcctaataatgctgcta

SEQ ID NO: 80131 - DNA, 25 bp, Homo sapiens
tgccatctgtcggaaggctagcttc

SEQ ID NO: 80132 - DNA, 25 bp, Homo sapiens
agtgtggccttaaaccttgcttttg

SEQ ID NO: 80133 - DNA, 25 bp, Homo sapiens
ggggagcccaattcagcagccttga

SEQ ID NO: 80134 - DNA, 25 bp, Homo sapiens
tagttggtctcacaagcctggaaca

SEQ ID NO: 80135 - DNA, 25 bp, Homo sapiens
cctaggactgtctggttagcatatt

SEQ ID NO: 80136 - DNA, 25 bp, Homo sapiens
gcctccgcctggttagcactaagaa

SEQ ID NO: 80137 - DNA, 25 bp, Homo sapiens
ggacctggttttcacgctccactgc

SEQ ID NO: 80138 - DNA, 25 bp, Homo sapiens
agatcagtagttgcttccattaaga

SEQ ID NO: 80139 - DNA, 25 bp, Homo sapiens
ttaccctgtagtagcatcgtgcatc

SEQ ID NO: 80140 - DNA, 25 bp, Homo sapiens
acagttctcctgtgctgctccaata

SEQ ID NO: 80141 - DNA, 25 bp, Homo sapiens
gtcacagagcgtgtcacagaagtta

SEQ ID NO: 80142 - DNA, 25 bp, Homo sapiens
gcagctgcaccgtccatgtttctta

SEQ ID NO: 80143 - DNA, 25 bp, Homo sapiens
ccaagtatgtactggggacacctca

SEQ ID NO: 80144 - DNA, 25 bp, Homo sapiens
gtggccacactttacctatttcttg

SEQ ID NO: 80145 - DNA, 25 bp, Homo sapiens
aggcacctgtttcctttcaacggga

SEQ ID NO: 80146 - DNA, 25 bp, Homo sapiens
ggggagcttctatctcacacactta

SEQ ID NO: 80147 - DNA, 25 bp, Homo sapiens
ctgcctaatctgtggggtatctcta

SEQ ID NO: 80148 - DNA, 25 bp, Homo sapiens
gcaagatccttagtgggaccacaga

SEQ ID NO: 80149 - DNA, 25 bp, Homo sapiens
ggacagctggctatgcaatactatg

SEQ ID NO: 80150 - DNA, 25 bp, Homo sapiens
cagcaggtaggatggaaaaattctc

SEQ ID NO: 80151 - DNA, 25 bp, Homo sapiens
ggcgtcggttctaacttccttgata

SEQ ID NO: 80152 - DNA, 25 bp, Homo sapiens
acatgcagggtttcagtgggtcctc

SEQ ID NO: 80153 - DNA, 25 bp, Homo sapiens
ttcgcccgcaacatggttttccagc

SEQ ID NO: 80154 - DNA, 25 bp, Homo sapiens
agatgtcgactgcagcatttagccc

SEQ ID NO: 80155 - DNA, 25 bp, Homo sapiens
acgtcctgtagatctgcctgaattg

SEQ ID NO: 80156 - DNA, 25 bp, Homo sapiens
ccttgatgaaattggggcctgagcc

SEQ ID NO: 80157 - DNA, 25 bp, Homo sapiens
ctccaacttggggtaaatcttcaca

SEQ ID NO: 80158 - DNA, 25 bp, Homo sapiens
atggttgcagcccttgggaacttaa

SEQ ID NO: 80159 - DNA, 25 bp, Homo sapiens
gtgtaactaactgcatccatggcca

SEQ ID NO: 80160 - DNA, 25 bp, Homo sapiens
ggccaagtcttctcactgatgtaca

SEQ ID NO: 80161 - DNA, 25 bp, Homo sapiens
ccaggctaggatgggttgacttcta

SEQ ID NO: 80162 - DNA, 25 bp, Homo sapiens
ctgctgactcaggtgacaccattta

SEQ ID NO: 80163 - DNA, 25 bp, Homo sapiens
gccttctgaggatagcgtaatactg

SEQ ID NO: 80164 - DNA, 25 bp, Homo sapiens
cctctgtgaaggtgttattgatctc

SEQ ID NO: 80165 - DNA, 25 bp, Homo sapiens
gccacgggctctcttccacagataa

SEQ ID NO: 80166 - DNA, 25 bp, Homo sapiens
gagtggtccctagaatccaacttta

SEQ ID NO: 80167 - DNA, 25 bp, Homo sapiens
tgtctcacgcaagcaactggtccta

SEQ ID NO: 80168 - DNA, 25 bp, Homo sapiens
gctaacctttgagactccatttgga

SEQ ID NO: 80169 - DNA, 25 bp, Homo sapiens
ggagctgcctcctgatttaactttt

SEQ ID NO: 80170 - DNA, 25 bp, Homo sapiens
cccgattaatggataggccacaata

SEQ ID NO: 80171 - DNA, 25 bp, Homo sapiens
tgtcccaagcgcctctaagtgttcc

SEQ ID NO: 80172 - DNA, 25 bp, Homo sapiens
ttggccctgagtcctgtgtttattc

SEQ ID NO: 80173 - DNA, 25 bp, Homo sapiens
gaatgcccttgtcccttccaattta

SEQ ID NO: 80174 - DNA, 25 bp, Homo sapiens
atgcttttcttttcacacttatgta

SEQ ID NO: 80175 - DNA, 25 bp, Homo sapiens
ggcactctgttcttcagcccttgtg

SEQ ID NO: 80176 - DNA, 25 bp, Homo sapiens
ggatttcccaaaccgcgacttgctg

SEQ ID NO: 80177 - DNA, 25 bp, Homo sapiens
tctggagcgaccctaaattagagcc

SEQ ID NO: 80178 - DNA, 25 bp, Homo sapiens
ggctcggccacttcattgccagtca

SEQ ID NO: 80179 - DNA, 25 bp, Homo sapiens
cgcagttccttcgtctttcacagta

SEQ ID NO: 80180 - DNA, 25 bp, Homo sapiens
tgacaggcagtcaccagttacagtc

SEQ ID NO: 80181 - DNA, 25 bp, Homo sapiens
ggagggcctcacaagcttttataga

SEQ ID NO: 80182 - DNA, 25 bp, Homo sapiens
tcctcttcttcaggggaaactcaga

SEQ ID NO: 80183 - DNA, 25 bp, Homo sapiens
cgatggctctgtcccttcaggtcta

SEQ ID NO: 80184 - DNA, 25 bp, Homo sapiens
cctgagtgtttccagtcccttggca

SEQ ID NO: 80185 - DNA, 25 bp, Homo sapiens
cccgtttctagggaatggatattca

SEQ ID NO: 80186 - DNA, 25 bp, Homo sapiens
tggatccctgtgcagttcccagtga

SEQ ID NO: 80187 - DNA, 25 bp, Homo sapiens
gactgctatttcctcacatgtgcca

SEQ ID NO: 80188 - DNA, 25 bp, Homo sapiens
aggaaccttgctgaacctttgtata

SEQ ID NO: 80189 - DNA, 25 bp, Homo sapiens
ggaggaccctggcaactaatgttca

SEQ ID NO: 80190 - DNA, 25 bp, Homo sapiens
ataatcaggacagagtaagggacag

SEQ ID NO: 80191 - DNA, 25 bp, Homo sapiens
tcatgggaatccagtaggctctgtc

SEQ ID NO: 80192 - DNA, 25 bp, Homo sapiens
ctaatatctgtgagcttggtgacca

SEQ ID NO: 80193 - DNA, 25 bp, Homo sapiens
ccggcgcgctaattacagcaaattg

SEQ ID NO: 80194 - DNA, 25 bp, Homo sapiens
ggcggcgtccttaaccttcgtagga

SEQ ID NO: 80195 - DNA, 25 bp, Homo sapiens
tacaggctcgcatttgcttcccggg

SEQ ID NO: 80196 - DNA, 25 bp, Homo sapiens
gccattgtggaaaagagcctgcagg

SEQ ID NO: 80197 - DNA, 25 bp, Homo sapiens
accgcctgttgatttcggctccacg

SEQ ID NO: 80198 - DNA, 25 bp, Homo sapiens
agtgcgctcgctgtttattttattg

SEQ ID NO: 80199 - DNA, 25 bp, Homo sapiens
acagtctctgaggttgggtcaaaga

SEQ ID NO: 80200 - DNA, 25 bp, Homo sapiens
cacctgggccagttttccaagttta

SEQ ID NO: 80201 - DNA, 25 bp, Homo sapiens
tggagacctttacctgaaacatggc

SEQ ID NO: 80202 - DNA, 25 bp, Homo sapiens
gtctctcccggctcaactgcaatta

SEQ ID NO: 80203 - DNA, 25 bp, Homo sapiens
tggccctgtttgttctagcactaag

SEQ ID NO: 80204 - DNA, 25 bp, Homo sapiens
ccctggagtgccaactatttgactg

SEQ ID NO: 80205 - DNA, 25 bp, Homo sapiens
ggccctccggctcgctaatatgaaa

SEQ ID NO: 80206 - DNA, 25 bp, Homo sapiens
gctgcgcacgtctccttcgaaggaa

SEQ ID NO: 80207 - DNA, 25 bp, Homo sapiens
tctgtctgcggacagcgcttcctga

SEQ ID NO: 80208 - DNA, 25 bp, Homo sapiens
cagcagctcctccttgggtgacagc

SEQ ID NO: 80209 - DNA, 25 bp, Homo sapiens
aagggagagctatcagccagccggc

SEQ ID NO: 80210 - DNA, 25 bp, Homo sapiens
ggggcttcttgcacaaaaaggcaaa

SEQ ID NO: 80211 - DNA, 25 bp, Homo sapiens
gtccaccggccatctactgtttctg

SEQ ID NO: 80212 - DNA, 25 bp, Homo sapiens
ttgtgcctttctgcctcccttggtt

SEQ ID NO: 80213 - DNA, 25 bp, Homo sapiens
cccgactgtgtctctcttgtttgta

SEQ ID NO: 80214 - DNA, 25 bp, Homo sapiens
tcagaattgttatgctcctcccttc

SEQ ID NO: 80215 - DNA, 25 bp, Homo sapiens
ggccgccctcatctggaataaattt

SEQ ID NO: 80216 - DNA, 25 bp, Homo sapiens
ctttcttcgaagtatgcaggtggca

SEQ ID NO: 80217 - DNA, 25 bp, Homo sapiens
agacatatgcctatacctgtatata

SEQ ID NO: 80218 - DNA, 25 bp, Homo sapiens
atgcatgcttgtaatacagtacaca

SEQ ID NO: 80219 - DNA, 25 bp, Homo sapiens
tgtaaatttaaatggaaatgtttgt

SEQ ID NO: 80220 - DNA, 25 bp, Homo sapiens
gaaaggtagtcaatagcaggacata

SEQ ID NO: 80221 - DNA, 25 bp, Homo sapiens
tctgtccagccacaactgtcatttg

SEQ ID NO: 80222 - DNA, 25 bp, Homo sapiens
agaagcctctgtcttactgccattt

SEQ ID NO: 80223 - DNA, 25 bp, Homo sapiens
gaagttaccatgtttctctaaggga

SEQ ID NO: 80224 - DNA, 25 bp, Homo sapiens
tgccctctacctgtgagataaattc

SEQ ID NO: 80225 - DNA, 25 bp, Homo sapiens
acactgatcttgtggtgagcgatgc

SEQ ID NO: 80226 - DNA, 25 bp, Homo sapiens
gtggcacttctgtcacttgctcaga

SEQ ID NO: 80227 - DNA, 25 bp, Homo sapiens
gcatccaagttaagtcacagtccta

SEQ ID NO: 80228 - DNA, 25 bp, Homo sapiens
agtggacctgatgtacccgttagtc

SEQ ID NO: 80229 - DNA, 25 bp, Homo sapiens
tgggagtaaactatacatgtgtatg

SEQ ID NO: 80230 - DNA, 25 bp, Homo sapiens
tgcaggctcatctagcaaggatgtc

SEQ ID NO: 80231 - DNA, 25 bp, Homo sapiens
gcccattggtgacatagctgccctg

SEQ ID NO: 80232 - DNA, 25 bp, Homo sapiens
cctgggatggacctgtcagaagctt

SEQ ID NO: 80233 - DNA, 25 bp, Homo sapiens
gctccatggtggtaatgcttcttcc

SEQ ID NO: 80234 - DNA, 25 bp, Homo sapiens
gcagtcagcacttggtagatctata

SEQ ID NO: 80235 - DNA, 25 bp, Homo sapiens
ggggctcctggaatcacatcaccta

SEQ ID NO: 80236 - DNA, 25 bp, Homo sapiens
gggacccaggccttggatatttttc

SEQ ID NO: 80237 - DNA, 25 bp, Homo sapiens
ggctccctgtgcatagtcccagtga

SEQ ID NO: 80238 - DNA, 25 bp, Homo sapiens
ctgattactttaaagaagctgtggc

SEQ ID NO: 80239 - DNA, 25 bp, Homo sapiens
gtgctagctaattctccctcaggtg

SEQ ID NO: 80240 - DNA, 25 bp, Homo sapiens
ttcaggatcatttggccacaggtca

SEQ ID NO: 80241 - DNA, 25 bp, Homo sapiens
ggtttgcattctcttggccacaata

SEQ ID NO: 80242 - DNA, 25 bp, Homo sapiens
ggaccaccttttgcagagatttgta

SEQ ID NO: 80243 - DNA, 25 bp, Homo sapiens
gccaaagttagtaccgttcaccatg

SEQ ID NO: 80244 - DNA, 25 bp, Homo sapiens
ggcattcttctatgatcccattatg

SEQ ID NO: 80245 - DNA, 25 bp, Homo sapiens
tttctggatttttaaatgcagcttg

SEQ ID NO: 80246 - DNA, 25 bp, Homo sapiens
gaaaatgatgtccatgttatataga

SEQ ID NO: 80247 - DNA, 25 bp, Homo sapiens
taccaacttttgtctttgtgggtta

SEQ ID NO: 80248 - DNA, 25 bp, Homo sapiens
tataactcaaaatctatgaaataca

SEQ ID NO: 80249 - DNA, 25 bp, Homo sapiens
ggccacaatttagtagctggttata

SEQ ID NO: 80250 - DNA, 25 bp, Homo sapiens
tcctgtgtcaaaaagtcctcaatgc

SEQ ID NO: 80251 - DNA, 25 bp, Homo sapiens
ggcttgctagcatctcagtattttt

SEQ ID NO: 80252 - DNA, 25 bp, Homo sapiens
tctgttttggggcaagatccttcta

SEQ ID NO: 80253 - DNA, 25 bp, Homo sapiens
ttaaggccggactagcaacagactg

SEQ ID NO: 80254 - DNA, 25 bp, Homo sapiens
aggggtcattggacccagatagtta

SEQ ID NO: 80255 - DNA, 25 bp, Homo sapiens
caaggcccaagcagatcagtattgc

SEQ ID NO: 80256 - DNA, 25 bp, Homo sapiens
accacttgcagttctgagtacacta

SEQ ID NO: 80257 - DNA, 25 bp, Homo sapiens
tagcatcatgcaacaggcggaaggg

SEQ ID NO: 80258 - DNA, 25 bp, Homo sapiens
gacttagttaagggcattttcactg

SEQ ID NO: 80259 - DNA, 25 bp, Homo sapiens
tgttccagggtcttcattgccagta

SEQ ID NO: 80260 - DNA, 25 bp, Homo sapiens
cttacacggtaaaagcctgggtttg

SEQ ID NO: 80261 - DNA, 25 bp, Homo sapiens
ggcaggtggtttttgccagaccata

SEQ ID NO: 80262 - DNA, 25 bp, Homo sapiens
gtggcttccaacgtccctctgctta

SEQ ID NO: 80263 - DNA, 25 bp, Homo sapiens
gttggaggaactagcttcaccttta

SEQ ID NO: 80264 - DNA, 25 bp, Homo sapiens
ggagtgggaactttactgacaaatc

SEQ ID NO: 80265 - DNA, 25 bp, Homo sapiens
acccccacagtgcattatgttttgt

SEQ ID NO: 80266 - DNA, 25 bp, Homo sapiens
ggcatgggttttatttggtcctaca

SEQ ID NO: 80267 - DNA, 25 bp, Homo sapiens
tgccatgggatggtgcaaaaacctc

SEQ ID NO: 80268 - DNA, 25 bp, Homo sapiens
gccaggctattttccagatggttta

SEQ ID NO: 80269 - DNA, 25 bp, Homo sapiens
gtccttgaggacattattgagctta

SEQ ID NO: 80270 - DNA, 25 bp, Homo sapiens
cacacaagggtgcaggtacagagta

SEQ ID NO: 80271 - DNA, 25 bp, Homo sapiens
actagccttaggatttgagacattg

SEQ ID NO: 80272 - DNA, 25 bp, Homo sapiens
gagacagagagagagtctggctctg

SEQ ID NO: 80273 - DNA, 25 bp, Homo sapiens
aatctagctgtgttggtgtcctttc

SEQ ID NO: 80274 - DNA, 25 bp, Homo sapiens
aggggcaggttaacatcagtatttc

SEQ ID NO: 80275 - DNA, 25 bp, Homo sapiens
gcaaacacagctcctagtaacatga

SEQ ID NO: 80276 - DNA, 25 bp, Homo sapiens
tgctgcctccgcagtggtacaactg

SEQ ID NO: 80277 - DNA, 25 bp, Homo sapiens
ttcaccagagctcttgaagcatatg

SEQ ID NO: 80278 - DNA, 25 bp, Homo sapiens
cttacaaaagtaagattttacgatt

SEQ ID NO: 80279 - DNA, 25 bp, Homo sapiens
ccaggttcttctcttgggagcttca

SEQ ID NO: 80280 - DNA, 25 bp, Homo sapiens
gtgggtctttattatctcagtgctc

SEQ ID NO: 80281 - DNA, 25 bp, Homo sapiens
agtctgtgtagaatggtctgcctca

SEQ ID NO: 80282 - DNA, 25 bp, Homo sapiens
tcccaccagttttaaggcaggctta

SEQ ID NO: 80283 - DNA, 25 bp, Homo sapiens
tttggcattgagacgcttttaaggc

SEQ ID NO: 80284 - DNA, 25 bp, Homo sapiens
ttctttatatgagagatagtgacaa

SEQ ID NO: 80285 - DNA, 25 bp, Homo sapiens
gttgatgccacaattagcaccctta

SEQ ID NO: 80286 - DNA, 25 bp, Homo sapiens
agcctcgtccttggattaggttaca

SEQ ID NO: 80287 - DNA, 25 bp, Homo sapiens
ccaggtggctctataagtctttgtc

SEQ ID NO: 80288 - DNA, 25 bp, Homo sapiens
tttatattattcgaaggatcccatg

SEQ ID NO: 80289 - DNA, 25 bp, Homo sapiens
aaaaatattcataaaggtttcaaat

SEQ ID NO: 80290 - DNA, 25 bp, Homo sapiens
ggaggctgcccaaaacagtatgttt

SEQ ID NO: 80291 - DNA, 25 bp, Homo sapiens
tccattgctaaatctggggaaaatc

SEQ ID NO: 80292 - DNA, 25 bp, Homo sapiens
cctccttgagtacagggcacataac

SEQ ID NO: 80293 - DNA, 25 bp, Homo sapiens
gccaggtaacaattcatttccatta

SEQ ID NO: 80294 - DNA, 25 bp, Homo sapiens
taggagctctgtatctgggacagta

SEQ ID NO: 80295 - DNA, 25 bp, Homo sapiens
tttgcacaacatcaggccagagctg

SEQ ID NO: 80296 - DNA, 25 bp, Homo sapiens
gttcactcatacatacacgactctg

SEQ ID NO: 80297 - DNA, 25 bp, Homo sapiens
aaatcttgagttgtatcagtttgag

SEQ ID NO: 80298 - DNA, 25 bp, Homo sapiens
tggcaatgcagactcactctctagt

SEQ ID NO: 80299 - DNA, 25 bp, Homo sapiens
agatgcagggaactcagaccaaata

SEQ ID NO: 80300 - DNA, 25 bp, Homo sapiens
tactcaagagaaaacgccctacatg

SEQ ID NO: 80301 - DNA, 25 bp, Homo sapiens
catacctctgtttttggctggaacc

SEQ ID NO: 80302 - DNA, 25 bp, Homo sapiens
gcgaagcactatcacaaggaatata

SEQ ID NO: 80303 - DNA, 25 bp, Homo sapiens
gctggcaacagggaggatgatatca

SEQ ID NO: 80304 - DNA, 25 bp, Homo sapiens
ccacggcacatttggccaggagtca

SEQ ID NO: 80305 - DNA, 25 bp, Homo sapiens
gcttggcccttatttgatactgata

SEQ ID NO: 80306 - DNA, 25 bp, Homo sapiens
ggtcaggtccagattgtttcatttg

SEQ ID NO: 80307 - DNA, 25 bp, Homo sapiens
gttcacctatttatttgttacattc

SEQ ID NO: 80308 - DNA, 25 bp, Homo sapiens
ccaaggggaggagaagcaatgaggg

SEQ ID NO: 80309 - DNA, 25 bp, Homo sapiens
gggctgttcccaatctccattgttg

SEQ ID NO: 80310 - DNA, 25 bp, Homo sapiens
tgtgcttgtgattgccggtaaatgc

SEQ ID NO: 80311 - DNA, 25 bp, Homo sapiens
ggtgcattccctttactctgttttc

SEQ ID NO: 80312 - DNA, 25 bp, Homo sapiens
tggcatccatatacagagggtcaga

SEQ ID NO: 80313 - DNA, 25 bp, Homo sapiens
tgaatattttaaattccttttgcac

SEQ ID NO: 80314 - DNA, 25 bp, Homo sapiens
ggtttcccttccgagctgcttcaga

SEQ ID NO: 80315 - DNA, 25 bp, Homo sapiens
ccacagcagggctcagattctcaga

SEQ ID NO: 80316 - DNA, 25 bp, Homo sapiens
gtctgcctgcctgtaagtctttgtc

SEQ ID NO: 80317 - DNA, 25 bp, Homo sapiens
aggctgccactccatcctgtcattg

SEQ ID NO: 80318 - DNA, 25 bp, Homo sapiens
ccacattctgggctgcatttcaata

SEQ ID NO: 80319 - DNA, 25 bp, Homo sapiens
acccaggttgaaatgtgtaataagc

SEQ ID NO: 80320 - DNA, 25 bp, Homo sapiens
agtggcaatgacatacttgtgcaaa

SEQ ID NO: 80321 - DNA, 25 bp, Homo sapiens
acctgtcatattctgcttgtgtgcg

SEQ ID NO: 80322 - DNA, 25 bp, Homo sapiens
gatgggataacgtcacaggagaatc

SEQ ID NO: 80323 - DNA, 25 bp, Homo sapiens
cattatttctgggaacaaaggctta

SEQ ID NO: 80324 - DNA, 25 bp, Homo sapiens
gtgagcactgttgtggccctcagta

SEQ ID NO: 80325 - DNA, 25 bp, Homo sapiens
ccttttggacgtgtgtgttcatttc

SEQ ID NO: 80326 - DNA, 25 bp, Homo sapiens
ccaacaattgggagcagatctgata

SEQ ID NO: 80327 - DNA, 25 bp, Homo sapiens
gctagctggtagtccattaattctc

SEQ ID NO: 80328 - DNA, 25 bp, Homo sapiens
ccccaaagtcattcagaagcatgat

SEQ ID NO: 80329 - DNA, 25 bp, Homo sapiens
tcctgttctaaaccacgattctgta

SEQ ID NO: 80330 - DNA, 25 bp, Homo sapiens
gccttggcttgtgaattaatttata

SEQ ID NO: 80331 - DNA, 25 bp, Homo sapiens
actgcccataggatcaatttcattc

SEQ ID NO: 80332 - DNA, 25 bp, Homo sapiens
atattaaagtgtgtttctgggtttg

SEQ ID NO: 80333 - DNA, 25 bp, Homo sapiens
ttcctggtattgtcagctgtgctgc

SEQ ID NO: 80334 - DNA, 25 bp, Homo sapiens
cagcgattgttgaagagagcctccc

SEQ ID NO: 80335 - DNA, 25 bp, Homo sapiens
tagcctaaggtagttctagaaatcc

SEQ ID NO: 80336 - DNA, 25 bp, Homo sapiens
ccaggctctaggatgtgtctatata

SEQ ID NO: 80337 - DNA, 25 bp, Homo sapiens
tcttgaccatatccggccttctgtg

SEQ ID NO: 80338 - DNA, 25 bp, Homo sapiens
tgacctatttaacagtgcatttttt

SEQ ID NO: 80339 - DNA, 25 bp, Homo sapiens
acagaattttatttgttaactatag

SEQ ID NO: 80340 - DNA, 25 bp, Homo sapiens
tcagcactggtgttcatgttcacca

SEQ ID NO: 80341 - DNA, 25 bp, Homo sapiens
ctgcaacatttgtgtaaggcccata

SEQ ID NO: 80342 - DNA, 25 bp, Homo sapiens
tgtaaaaggtactacatcttcagta

SEQ ID NO: 80343 - DNA, 25 bp, Homo sapiens
agggatcacattctttttgcagaga

SEQ ID NO: 80344 - DNA, 25 bp, Homo sapiens
tgcaagttctgactccttaagaaag

SEQ ID NO: 80345 - DNA, 25 bp, Homo sapiens
tgctccctcacaaaactagtgtttg

SEQ ID NO: 80346 - DNA, 25 bp, Homo sapiens
gaagccttctgtcaagcagtcttta

SEQ ID NO: 80347 - DNA, 25 bp, Homo sapiens
ctcttgaggaggtcttgtgtacata

SEQ ID NO: 80348 - DNA, 25 bp, Homo sapiens
gtaccacctggttctccttcaagga

SEQ ID NO: 80349 - DNA, 25 bp, Homo sapiens
agcagcttccttttgggactggaca

SEQ ID NO: 80350 - DNA, 25 bp, Homo sapiens
tgctgctaccagtgccaaatgttca

SEQ ID NO: 80351 - DNA, 25 bp, Homo sapiens
gcttgctattcagcaggaaattttt

SEQ ID NO: 80352 - DNA, 25 bp, Homo sapiens
tttcttctttttgggaagaagaaaa

SEQ ID NO: 80353 - DNA, 25 bp, Homo sapiens
acctgaggtccttattgtcttaaca

SEQ ID NO: 80354 - DNA, 25 bp, Homo sapiens
gtatataacatagaacacaacactt

SEQ ID NO: 80355 - DNA, 25 bp, Homo sapiens
gcctgcaatcagaaatagggttttg

SEQ ID NO: 80356 - DNA, 25 bp, Homo sapiens
ccctcatgcctcaagtttggagtgc

SEQ ID NO: 80357 - DNA, 25 bp, Homo sapiens
ctcctgattctgttcccacactatg

SEQ ID NO: 80358 - DNA, 25 bp, Homo sapiens
tgacttctcagcactcatcagtttg

SEQ ID NO: 80359 - DNA, 25 bp, Homo sapiens
gtcaccattttgttcctgcttccta

SEQ ID NO: 80360 - DNA, 25 bp, Homo sapiens
cttgatcttccaccaaagggtagtg

SEQ ID NO: 80361 - DNA, 25 bp, Homo sapiens
cctgaggcagaatgttaaaaatatc

SEQ ID NO: 80362 - DNA, 25 bp, Homo sapiens
ttaactgtgggatacctaaaatacc

SEQ ID NO: 80363 - DNA, 25 bp, Homo sapiens
cccaagttgggtcatgaaatgtatc

SEQ ID NO: 80364 - DNA, 25 bp, Homo sapiens
ggttctccctggtttacatctacta

SEQ ID NO: 80365 - DNA, 25 bp, Homo sapiens
gaggcagactccacccagattcata

SEQ ID NO: 80366 - DNA, 25 bp, Homo sapiens
ccaaagctcccaagtgatcctgatc

SEQ ID NO: 80367 - DNA, 25 bp, Homo sapiens
gcaacatggtttccttctctgaaga

SEQ ID NO: 80368 - DNA, 25 bp, Homo sapiens
gataaaactcattcacttggaaaac

SEQ ID NO: 80369 - DNA, 25 bp, Homo sapiens
ctgactggcaaatgttcaatattga

SEQ ID NO: 80370 - DNA, 25 bp, Homo sapiens
taagactaccactattagtgggggt

SEQ ID NO: 80371 - DNA, 25 bp, Homo sapiens
cattccaataccagacaagccccca

SEQ ID NO: 80372 - DNA, 25 bp, Homo sapiens
acctggtctgccctaattactggga

SEQ ID NO: 80373 - DNA, 25 bp, Homo sapiens
atcctctgaggaaagaacatccctg

SEQ ID NO: 80374 - DNA, 25 bp, Homo sapiens
agctcattcatttaaaaaagttgtg

SEQ ID NO: 80375 - DNA, 25 bp, Homo sapiens
gctgcccaggctgttacatgatgta

SEQ ID NO: 80376 - DNA, 25 bp, Homo sapiens
tggccgatcacagaattcgcattga

SEQ ID NO: 80377 - DNA, 25 bp, Homo sapiens
tgaaccggtttgttgctatacatgc

SEQ ID NO: 80378 - DNA, 25 bp, Homo sapiens
cgtgtttgttctcgagtactggcta

SEQ ID NO: 80379 - DNA, 25 bp, Homo sapiens
ctcctacagggagctcagagcattt

SEQ ID NO: 80380 - DNA, 25 bp, Homo sapiens
ttcacattgtccaaagggctctagg

SEQ ID NO: 80381 - DNA, 25 bp, Homo sapiens
ttgaactgctttggtgtgatagaca

SEQ ID NO: 80382 - DNA, 25 bp, Homo sapiens
ttgcgcttcttgtgttgcaagctta

SEQ ID NO: 80383 - DNA, 25 bp, Homo sapiens
cctgcgttttgttctgtggggattc

SEQ ID NO: 80384 - DNA, 25 bp, Homo sapiens
tggcccaaccctgatgcaatgctta

SEQ ID NO: 80385 - DNA, 25 bp, Homo sapiens
ttgccctgggcaaatctcgacttta

SEQ ID NO: 80386 - DNA, 25 bp, Homo sapiens
tgttacttacaatgctgccggatta

SEQ ID NO: 80387 - DNA, 25 bp, Homo sapiens
cgaagccaaaaaccaaaaacttcta

SEQ ID NO: 80388 - DNA, 25 bp, Homo sapiens
gcaggttgtaagtacagcttctcta

SEQ ID NO: 80389 - DNA, 25 bp, Homo sapiens
tgcgtgtctgctggtacccaattca

SEQ ID NO: 80390 - DNA, 25 bp, Homo sapiens
tggacatgtccatatggattatata

SEQ ID NO: 80391 - DNA, 25 bp, Homo sapiens
cagcctgaagtgttctttggtacca

SEQ ID NO: 80392 - DNA, 25 bp, Homo sapiens
caggactgagtaagaaaacactttg

SEQ ID NO: 80393 - DNA, 25 bp, Homo sapiens
ccctagattatttcttcattttata

SEQ ID NO: 80394 - DNA, 25 bp, Homo sapiens
attcagtttccacgagttcctcatg

SEQ ID NO: 80395 - DNA, 25 bp, Homo sapiens
ccataggggatcacggtattgcttc

SEQ ID NO: 80396 - DNA, 25 bp, Homo sapiens
cagggagccaaaactagaattaata

SEQ ID NO: 80397 - DNA, 25 bp, Homo sapiens
ttcctgtgctgggatacaactttga

SEQ ID NO: 80398 - DNA, 25 bp, Homo sapiens
cccagctatggtctcaaaagtgtta

SEQ ID NO: 80399 - DNA, 25 bp, Homo sapiens
caaagaccttatgttgggcaggagc

SEQ ID NO: 80400 - DNA, 25 bp, Homo sapiens
cacaagccaggcaacaggggtttca

SEQ ID NO: 80401 - DNA, 25 bp, Homo sapiens
ttccctaggagtatttttaaagatg

SEQ ID NO: 80402 - DNA, 25 bp, Homo sapiens
tcaatcccaaagcttttccctgtga

SEQ ID NO: 80403 - DNA, 25 bp, Homo sapiens
acgcttcatttattgaggtccctca

SEQ ID NO: 80404 - DNA, 25 bp, Homo sapiens
taaaaaacgtgctttctgtgtaaca

SEQ ID NO: 80405 - DNA, 25 bp, Homo sapiens
tattttaacaagagaaaaggataaa

SEQ ID NO: 80406 - DNA, 25 bp, Homo sapiens
ttctcattgactgctggggaaaata

SEQ ID NO: 80407 - DNA, 25 bp, Homo sapiens
ttcctgtgtagcttatggtaatgtt

SEQ ID NO: 80408 - DNA, 25 bp, Homo sapiens
ggcgcccatgtagctgattcttgtt

SEQ ID NO: 80409 - DNA, 25 bp, Homo sapiens
tggaggaccctgactgcctatagtg

SEQ ID NO: 80410 - DNA, 25 bp, Homo sapiens
ctatcatggcctttgttcggacaca

SEQ ID NO: 80411 - DNA, 25 bp, Homo sapiens
actgggtcagcttggcaatcactta

SEQ ID NO: 80412 - DNA, 25 bp, Homo sapiens
cagctgtggagcctagtcaccaatc

SEQ ID NO: 80413 - DNA, 25 bp, Homo sapiens
gcctggcagctcaaccacaatgtga

SEQ ID NO: 80414 - DNA, 25 bp, Homo sapiens
atggctcatgttctgctctggacta

SEQ ID NO: 80415 - DNA, 25 bp, Homo sapiens
acctggagccacttattagtttttg

SEQ ID NO: 80416 - DNA, 25 bp, Homo sapiens
agctagaggtcttggttacatgccc

SEQ ID NO: 80417 - DNA, 25 bp, Homo sapiens
ataatgtggggatgagagctctttt

SEQ ID NO: 80418 - DNA, 25 bp, Homo sapiens
aaaggccctgctctcaatgttgttg

SEQ ID NO: 80419 - DNA, 25 bp, Homo sapiens
ggacaggctccctctgcattagaaa

SEQ ID NO: 80420 - DNA, 25 bp, Homo sapiens
tctggatttattctttgctgtcatc

SEQ ID NO: 80421 - DNA, 25 bp, Homo sapiens
tgctgccattgtctacttcaaaagg

SEQ ID NO: 80422 - DNA, 25 bp, Homo sapiens
tgtaggctggcttctgttactaaca

SEQ ID NO: 80423 - DNA, 25 bp, Homo sapiens
gcagcattgacagtatcctatgaca

SEQ ID NO: 80424 - DNA, 25 bp, Homo sapiens
acaggaaaatcactagtagttatgc

SEQ ID NO: 80425 - DNA, 25 bp, Homo sapiens
tcaggtgagctgtccagaaagtgac

SEQ ID NO: 80426 - DNA, 25 bp, Homo sapiens
gctctcctgcatagtgggaacaaga

SEQ ID NO: 80427 - DNA, 25 bp, Homo sapiens
ttgtaagtagtcaaagtttggaact

SEQ ID NO: 80428 - DNA, 25 bp, Homo sapiens
ctgtatatagaggtaacgtaatgac

SEQ ID NO: 80429 - DNA, 25 bp, Homo sapiens
tatgacatcaatggccagttagtac

SEQ ID NO: 80430 - DNA, 25 bp, Homo sapiens
gagttccttgcttgccttctttcca

SEQ ID NO: 80431 - DNA, 25 bp, Homo sapiens
tgggcccagtgaggatgcattatta

SEQ ID NO: 80432 - DNA, 25 bp, Homo sapiens
ggagatctcttgctgactgctgaca

SEQ ID NO: 80433 - DNA, 25 bp, Homo sapiens
agcaggcactctcttcgtgttgtta

SEQ ID NO: 80434 - DNA, 25 bp, Homo sapiens
tgctagtactgctttgctacagtac

SEQ ID NO: 80435 - DNA, 25 bp, Homo sapiens
cagcctatgtttgcctcagtgtttc

SEQ ID NO: 80436 - DNA, 25 bp, Homo sapiens
cactggaggatgcttggaataaacc

SEQ ID NO: 80437 - DNA, 25 bp, Homo sapiens
aataacattttatgttccaataact

SEQ ID NO: 80438 - DNA, 25 bp, Homo sapiens
ccttctttatttcagatgtggcaaa

SEQ ID NO: 80439 - DNA, 25 bp, Homo sapiens
catatatatttcccatttttaaaat

SEQ ID NO: 80440 - DNA, 25 bp, Homo sapiens
tccaagagagcatacccttttaagc

SEQ ID NO: 80441 - DNA, 25 bp, Homo sapiens
tttcttactgtactagggcagccta

SEQ ID NO: 80442 - DNA, 25 bp, Homo sapiens
cttctccttggaaatgggattacta

SEQ ID NO: 80443 - DNA, 25 bp, Homo sapiens
gtgaggccttgagtttagatttttg

SEQ ID NO: 80444 - DNA, 25 bp, Homo sapiens
tgattgtgagtcagggccaccatcc

SEQ ID NO: 80445 - DNA, 25 bp, Homo sapiens
gagcttctagcatacatatatcccg

SEQ ID NO: 80446 - DNA, 25 bp, Homo sapiens
ttcgtgtaagtcagaaaggccctta

SEQ ID NO: 80447 - DNA, 25 bp, Homo sapiens
gtccttgtcaatgcctgttcatata

SEQ ID NO: 80448 - DNA, 25 bp, Homo sapiens
ccagatgtttctctatgccgaaata

SEQ ID NO: 80449 - DNA, 25 bp, Homo sapiens
aaggccatcttgtttttcccagttg

SEQ ID NO: 80450 - DNA, 25 bp, Homo sapiens
acttggggtttttattcagggctcc

SEQ ID NO: 80451 - DNA, 25 bp, Homo sapiens
cctcaatgtagttgtgctgacctta

SEQ ID NO: 80452 - DNA, 25 bp, Homo sapiens
tcagggcacagctacattgattatg

SEQ ID NO: 80453 - DNA, 25 bp, Homo sapiens
agcaattggtgcacatcatgagtca

SEQ ID NO: 80454 - DNA, 25 bp, Homo sapiens
gccctctgagaccttactcttgata

SEQ ID NO: 80455 - DNA, 25 bp, Homo sapiens
ggctctgacagcttggataaaatga

SEQ ID NO: 80456 - DNA, 25 bp, Homo sapiens
tcagagaagataacatgcagaaagt

SEQ ID NO: 80457 - DNA, 25 bp, Homo sapiens
tgttcctctagtggttttacaaatg

SEQ ID NO: 80458 - DNA, 25 bp, Homo sapiens
cgtgtgcttcagcaaaaggatgtgc

SEQ ID NO: 80459 - DNA, 25 bp, Homo sapiens
ttcatcttatgttggcctgggcaca

SEQ ID NO: 80460 - DNA, 25 bp, Homo sapiens
tcccagggctgaggttccaaaatca

SEQ ID NO: 80461 - DNA, 25 bp, Homo sapiens
taaatatgccagcttgtgacacacg

SEQ ID NO: 80462 - DNA, 25 bp, Homo sapiens
ggatctcttggaatgtggtaacctc

SEQ ID NO: 80463 - DNA, 25 bp, Homo sapiens
atgggacacttgctttctgaaaatg

SEQ ID NO: 80464 - DNA, 25 bp, Homo sapiens
actgagtgactttgtgcggttttta

SEQ ID NO: 80465 - DNA, 25 bp, Homo sapiens
aagggcctccattctgctcagttta

SEQ ID NO: 80466 - DNA, 25 bp, Homo sapiens
tggtttccagatcacatagcctttg

SEQ ID NO: 80467 - DNA, 25 bp, Homo sapiens
ctgagttatacaaaagcggatactg

SEQ ID NO: 80468 - DNA, 25 bp, Homo sapiens
catttataccttcctcaataagttg

SEQ ID NO: 80469 - DNA, 25 bp, Homo sapiens
catcagtttcatggttctcttaatt

SEQ ID NO: 80470 - DNA, 25 bp, Homo sapiens
tagctcgagaggcaagcaaatgtcc

SEQ ID NO: 80471 - DNA, 25 bp, Homo sapiens
gagatttacttacttcagaagggca

SEQ ID NO: 80472 - DNA, 25 bp, Homo sapiens
acctatttatttacgtctgctttaa

SEQ ID NO: 80473 - DNA, 25 bp, Homo sapiens
agggcctgtctcttttcacttaata

SEQ ID NO: 80474 - DNA, 25 bp, Homo sapiens
acatgggtcagtacgcttggattca

SEQ ID NO: 80475 - DNA, 25 bp, Homo sapiens
ccgtagtacatcctgaactatcttc

SEQ ID NO: 80476 - DNA, 25 bp, Homo sapiens
cctgctaaggttgcctggaaatgga

SEQ ID NO: 80477 - DNA, 25 bp, Homo sapiens
ttcaatagtacccagagtgtgtcca

SEQ ID NO: 80478 - DNA, 25 bp, Homo sapiens
tctaggttctgttggtcctcttttc

SEQ ID NO: 80479 - DNA, 25 bp, Homo sapiens
ctgaccattagagcttaggcgtttt

SEQ ID NO: 80480 - DNA, 25 bp, Homo sapiens
ttcgagaaagctgaatggaatggtc

SEQ ID NO: 80481 - DNA, 25 bp, Homo sapiens
ttcgtgctgtaaaaccctgttgaca

SEQ ID NO: 80482 - DNA, 25 bp, Homo sapiens
caatgtcaatgctctcttaggtctg

SEQ ID NO: 80483 - DNA, 25 bp, Homo sapiens
gctatgcaggattagggttaccacc

SEQ ID NO: 80484 - DNA, 25 bp, Homo sapiens
ctctggaaggctaacgaggatatca

SEQ ID NO: 80485 - DNA, 25 bp, Homo sapiens
ttaagctgttaatgtgtcagacact

SEQ ID NO: 80486 - DNA, 25 bp, Homo sapiens
gaaacctgaatacagagaaagagag

SEQ ID NO: 80487 - DNA, 25 bp, Homo sapiens
atccaggtgactgctcagggcttca

SEQ ID NO: 80488 - DNA, 25 bp, Homo sapiens
acgcctgaagtttgccctacctaca

SEQ ID NO: 80489 - DNA, 25 bp, Homo sapiens
tagcctttgtgatctccctctgaga

SEQ ID NO: 80490 - DNA, 25 bp, Homo sapiens
ccagcccaagttttagagtgatgtt

SEQ ID NO: 80491 - DNA, 25 bp, Homo sapiens
acctctcaaaaagtatgggatagtc

SEQ ID NO: 80492 - DNA, 25 bp, Homo sapiens
aattttatatttgctcgggattctg

SEQ ID NO: 80493 - DNA, 25 bp, Homo sapiens
ttgcccagagcacgtagttaataca

SEQ ID NO: 80494 - DNA, 25 bp, Homo sapiens
gggcagctttcactagtcatcacta

SEQ ID NO: 80495 - DNA, 25 bp, Homo sapiens
cgaaaatggctgtggtcttgatact

SEQ ID NO: 80496 - DNA, 25 bp, Homo sapiens
gattttgcactgtgagcaagataac

SEQ ID NO: 80497 - DNA, 25 bp, Homo sapiens
tcagagagcgctcatcttaaacagc

SEQ ID NO: 80498 - DNA, 25 bp, Homo sapiens
tcagccagcttctcccaggtgtagg

SEQ ID NO: 80499 - DNA, 25 bp, Homo sapiens
ccaaagccttgcagacatcttgttg

SEQ ID NO: 80500 - DNA, 25 bp, Homo sapiens
caatatatacaaatcagcatatgca

SEQ ID NO: 80501 - DNA, 25 bp, Homo sapiens
aaagtagtgtataccattgccacag

SEQ ID NO: 80502 - DNA, 25 bp, Homo sapiens
tagcagttgtgctcctcagagatga

SEQ ID NO: 80503 - DNA, 25 bp, Homo sapiens
taaagcctgaaatgttgttggttaa

SEQ ID NO: 80504 - DNA, 25 bp, Homo sapiens
gagttgcaagccacagctccatgta

SEQ ID NO: 80505 - DNA, 25 bp, Homo sapiens
ccctgtggggatcttgctacagata

SEQ ID NO: 80506 - DNA, 25 bp, Homo sapiens
cttgcttggcttacagggaagattt

SEQ ID NO: 80507 - DNA, 25 bp, Homo sapiens
tcctctcttcagttgtggctttgtc

SEQ ID NO: 80508 - DNA, 25 bp, Homo sapiens
gtctgggagcctttgagtaatctca

SEQ ID NO: 80509 - DNA, 25 bp, Homo sapiens
gggacatgccatctacacattagca

SEQ ID NO: 80510 - DNA, 25 bp, Homo sapiens
tctgatctgcttctcttaaactggc

SEQ ID NO: 80511 - DNA, 25 bp, Homo sapiens
tttaaaagaaattagggagggcatt

SEQ ID NO: 80512 - DNA, 25 bp, Homo sapiens
gagcacacttcttacttcttggata

SEQ ID NO: 80513 - DNA, 25 bp, Homo sapiens
gaagttcagccaatccctacctaga

SEQ ID NO: 80514 - DNA, 25 bp, Homo sapiens
agtgctagtctccagccaaagtttc

SEQ ID NO: 80515 - DNA, 25 bp, Homo sapiens
caatgataccaagaaaccctagaag

SEQ ID NO: 80516 - DNA, 25 bp, Homo sapiens
agactgcattggcttacttattatc

SEQ ID NO: 80517 - DNA, 25 bp, Homo sapiens
gtgtccagccaggtattcagattta

SEQ ID NO: 80518 - DNA, 25 bp, Homo sapiens
ttctggtggatagagaatcccttcc

SEQ ID NO: 80519 - DNA, 25 bp, Homo sapiens
gtgtctccctagaggatttcaagta

SEQ ID NO: 80520 - DNA, 25 bp, Homo sapiens
agtgactgtgctccaaccatcagga

SEQ ID NO: 80521 - DNA, 25 bp, Homo sapiens
aggctgaatcctagtttatcactga

SEQ ID NO: 80522 - DNA, 25 bp, Homo sapiens
cccgcacttgtctcatgatttaaaa

SEQ ID NO: 80523 - DNA, 25 bp, Homo sapiens
aaaaagaaagaaacattggctttga

SEQ ID NO: 80524 - DNA, 25 bp, Homo sapiens
ggccttttaagaaagtataagaaac

SEQ ID NO: 80525 - DNA, 25 bp, Homo sapiens
tttccgtatgtgcagcacttacatg

SEQ ID NO: 80526 - DNA, 25 bp, Homo sapiens
gcttgcctctgtcacagcaataata

SEQ ID NO: 80527 - DNA, 25 bp, Homo sapiens
tgtaagatcctgtatgaataagtta

SEQ ID NO: 80528 - DNA, 25 bp, Homo sapiens
aaaatatatagatggtaataaatac

SEQ ID NO: 80529 - DNA, 25 bp, Homo sapiens
tcctcttcataaagcagtgtgactc

SEQ ID NO: 80530 - DNA, 25 bp, Homo sapiens
cagtgcacattcctggtaccaaaga

SEQ ID NO: 80531 - DNA, 25 bp, Homo sapiens
tatcacttacaaattctgccatcaa

SEQ ID NO: 80532 - DNA, 25 bp, Homo sapiens
accctgtcctactaatccgaaaggg

SEQ ID NO: 80533 - DNA, 25 bp, Homo sapiens
ccctagattcttgcttttgtcccaa

SEQ ID NO: 80534 - DNA, 25 bp, Homo sapiens
ggaatccctgatctgcctggccaca

SEQ ID NO: 80535 - DNA, 25 bp, Homo sapiens
ctagctttgcaatacctgtgtgacc

SEQ ID NO: 80536 - DNA, 25 bp, Homo sapiens
gtgcggctaactctaactcttggaa

SEQ ID NO: 80537 - DNA, 25 bp, Homo sapiens
acgctgtgtggttttcttgggaata

SEQ ID NO: 80538 - DNA, 25 bp, Homo sapiens
ctgctcattttgtgccttgcttagg

SEQ ID NO: 80539 - DNA, 25 bp, Homo sapiens
cgctttgctggctacttcctaggta

SEQ ID NO: 80540 - DNA, 25 bp, Homo sapiens
tcctcacgttaagtcatgccacatg

SEQ ID NO: 80541 - DNA, 25 bp, Homo sapiens
ggccctgggaaaactagtgaaacta

SEQ ID NO: 80542 - DNA, 25 bp, Homo sapiens
agttctggatcttaagcttttggca

SEQ ID NO: 80543 - DNA, 25 bp, Homo sapiens
gcacagagctgccaaaatccaccaa

SEQ ID NO: 80544 - DNA, 25 bp, Homo sapiens
tgggacattacagttctggagctta

SEQ ID NO: 80545 - DNA, 25 bp, Homo sapiens
cacccacttcaaacagaaaagaatt

SEQ ID NO: 80546 - DNA, 25 bp, Homo sapiens
taccactttttactatcaggccagg

SEQ ID NO: 80547 - DNA, 25 bp, Homo sapiens
cctgtccttggtaccagcaaaagta

SEQ ID NO: 80548 - DNA, 25 bp, Homo sapiens
ggaaggaaacagcaggcctacttta

SEQ ID NO: 80549 - DNA, 25 bp, Homo sapiens
gatgctccttttgttgtctttgtaa

SEQ ID NO: 80550 - DNA, 25 bp, Homo sapiens
ggagccactttgactctgaccagta

SEQ ID NO: 80551 - DNA, 25 bp, Homo sapiens
ctggcaaggcctaagactcatgact

SEQ ID NO: 80552 - DNA, 25 bp, Homo sapiens
tattttacctctaaaaaataatttg

SEQ ID NO: 80553 - DNA, 25 bp, Homo sapiens
agggccacttagaactgctttttta

SEQ ID NO: 80554 - DNA, 25 bp, Homo sapiens
acttagggtttctcttggtcattga

SEQ ID NO: 80555 - DNA, 25 bp, Homo sapiens
tgccatgagctctgtgccagccaca

SEQ ID NO: 80556 - DNA, 25 bp, Homo sapiens
ggggacctcgttccacaatggttga

SEQ ID NO: 80557 - DNA, 25 bp, Homo sapiens
actacctatgggagggccagcattc

SEQ ID NO: 80558 - DNA, 25 bp, Homo sapiens
ggcctccatgtaaggtcagctgata

SEQ ID NO: 80559 - DNA, 25 bp, Homo sapiens
gccctgggcttttggagatagaata

SEQ ID NO: 80560 - DNA, 25 bp, Homo sapiens
cctccactggtctgggttgaaagta

SEQ ID NO: 80561 - DNA, 25 bp, Homo sapiens
ttcaagagaaagtcaggataggctg

SEQ ID NO: 80562 - DNA, 25 bp, Homo sapiens
actatttatgcctattcatactcat

SEQ ID NO: 80563 - DNA, 25 bp, Homo sapiens
tgagtccaacatgcagcaatacatg

SEQ ID NO: 80564 - DNA, 25 bp, Homo sapiens
catgggtatccctgagaatctcttc

SEQ ID NO: 80565 - DNA, 25 bp, Homo sapiens
gctgttattacaccctcaagttgta

SEQ ID NO: 80566 - DNA, 25 bp, Homo sapiens
gccagtggtagaactggaactaagt

SEQ ID NO: 80567 - DNA, 25 bp, Homo sapiens
gtcacgcacactgtttacatgaatg

SEQ ID NO: 80568 - DNA, 25 bp, Homo sapiens
tagcaactgttagggaattctcctg

SEQ ID NO: 80569 - DNA, 25 bp, Homo sapiens
tctggcttctagacactgttttgtg

SEQ ID NO: 80570 - DNA, 25 bp, Homo sapiens
tccctattgttttgaccagagatga

SEQ ID NO: 80571 - DNA, 25 bp, Homo sapiens
tactcgtgtcccaagtccatgactg

SEQ ID NO: 80572 - DNA, 25 bp, Homo sapiens
tccagtgccggtatgtttctcaata

SEQ ID NO: 80573 - DNA, 25 bp, Homo sapiens
ctttctttggagagatggcccaacc

SEQ ID NO: 80574 - DNA, 25 bp, Homo sapiens
ggaccatttagaagctcctcacatg

SEQ ID NO: 80575 - DNA, 25 bp, Homo sapiens
agttacaactgtagagagataatca

SEQ ID NO: 80576 - DNA, 25 bp, Homo sapiens
ttgctcttatcagcttgagaaaatc

SEQ ID NO: 80577 - DNA, 25 bp, Homo sapiens
gctgcgctgcctcaaaggataaatc

SEQ ID NO: 80578 - DNA, 25 bp, Homo sapiens
ctctctggacaacatggactacgta

SEQ ID NO: 80579 - DNA, 25 bp, Homo sapiens
acaccatttttgtgagttgctgctg

SEQ ID NO: 80580 - DNA, 25 bp, Homo sapiens
aggccagccctgaagatgaactttc

SEQ ID NO: 80581 - DNA, 25 bp, Homo sapiens
ggtctgggctgtcatgaaactttta

SEQ ID NO: 80582 - DNA, 25 bp, Homo sapiens
gactacactctatatggttgccaga

SEQ ID NO: 80583 - DNA, 25 bp, Homo sapiens
gtgctttgccatactgacatttctc

SEQ ID NO: 80584 - DNA, 25 bp, Homo sapiens
ctcaggttcccaaacattatgcttc

SEQ ID NO: 80585 - DNA, 25 bp, Homo sapiens
ttggaggtacttcgataacatcatg

SEQ ID NO: 80586 - DNA, 25 bp, Homo sapiens
tcccatggacatcttgaacacaatt

SEQ ID NO: 80587 - DNA, 25 bp, Homo sapiens
ccagacctatagtggcatgacctca

SEQ ID NO: 80588 - DNA, 25 bp, Homo sapiens
ggtagccctttttggacaccacctt

SEQ ID NO: 80589 - DNA, 25 bp, Homo sapiens
ctgagaacctgggacacctgtaata

SEQ ID NO: 80590 - DNA, 25 bp, Homo sapiens
tgcctgcctaggatgtttctaataa

SEQ ID NO: 80591 - DNA, 25 bp, Homo sapiens
tctggcaagtttaggcagctactcc

SEQ ID NO: 80592 - DNA, 25 bp, Homo sapiens
aggctactcaagtggaccagttttc

SEQ ID NO: 80593 - DNA, 25 bp, Homo sapiens
tggccacatagcatagcagttcttg

SEQ ID NO: 80594 - DNA, 25 bp, Homo sapiens
gttgtcctgtctcaagccaaatgca

SEQ ID NO: 80595 - DNA, 25 bp, Homo sapiens
cctacctttggatatagcaatcttt

SEQ ID NO: 80596 - DNA, 25 bp, Homo sapiens
tccctcgaggcattgttacaacacg

SEQ ID NO: 80597 - DNA, 25 bp, Homo sapiens
ccagttctattaaccttggagctga

SEQ ID NO: 80598 - DNA, 25 bp, Homo sapiens
tttccctgagagcagcactccctta

SEQ ID NO: 80599 - DNA, 25 bp, Homo sapiens
cactggttttagctatctgggtcac

SEQ ID NO: 80600 - DNA, 25 bp, Homo sapiens
atggattgtcaactgggtacctttc

SEQ ID NO: 80601 - DNA, 25 bp, Homo sapiens
agaactcactgaagcaatctgatta

SEQ ID NO: 80602 - DNA, 25 bp, Homo sapiens
gttaatgaaatgttatattaagcaa

SEQ ID NO: 80603 - DNA, 25 bp, Homo sapiens
tctttctgtgtcatattccgttttt

SEQ ID NO: 80604 - DNA, 25 bp, Homo sapiens
tccatggactcctgcagaatgttca

SEQ ID NO: 80605 - DNA, 25 bp, Homo sapiens
gcacttgccttctggtgtgtcctca

SEQ ID NO: 80606 - DNA, 25 bp, Homo sapiens
agctggcctttgacttgacattatg

SEQ ID NO: 80607 - DNA, 25 bp, Homo sapiens
aggggctaattttttccagtatctc

SEQ ID NO: 80608 - DNA, 25 bp, Homo sapiens
actcttactgtgtatgaatttaaaa

SEQ ID NO: 80609 - DNA, 25 bp, Homo sapiens
tcgggaatgagacgtaaaacagctc

SEQ ID NO: 80610 - DNA, 25 bp, Homo sapiens
atggtcctagtcacatttctgagtc

SEQ ID NO: 80611 - DNA, 25 bp, Homo sapiens
tccatctcctaattccttgacatgt

SEQ ID NO: 80612 - DNA, 25 bp, Homo sapiens
gaatgggataatattgtaattcaga

SEQ ID NO: 80613 - DNA, 25 bp, Homo sapiens
ggacctactgtaccttacttgtgaa

SEQ ID NO: 80614 - DNA, 25 bp, Homo sapiens
tcatggcattctatgtagctttatc

SEQ ID NO: 80615 - DNA, 25 bp, Homo sapiens
tgtactctctcagattagatattaa

SEQ ID NO: 80616 - DNA, 25 bp, Homo sapiens
atggcccaggtcagtttattggtta

SEQ ID NO: 80617 - DNA, 25 bp, Homo sapiens
tgacttcaggaaaataagctttgcc

SEQ ID NO: 80618 - DNA, 25 bp, Homo sapiens
tccatgcagcaggtagaaaggttgt

SEQ ID NO: 80619 - DNA, 25 bp, Homo sapiens
aacctctttcacagctcagttaagg

SEQ ID NO: 80620 - DNA, 25 bp, Homo sapiens
tggacacatttactatccctagatg

SEQ ID NO: 80621 - DNA, 25 bp, Homo sapiens
cattatagtagtccttgggcaccca

SEQ ID NO: 80622 - DNA, 25 bp, Homo sapiens
tgggccagcatagataaagcattta

SEQ ID NO: 80623 - DNA, 25 bp, Homo sapiens
tgttgtggccatacttacctctcta

SEQ ID NO: 80624 - DNA, 25 bp, Homo sapiens
atgctgcaaaatccactgatggttt

SEQ ID NO: 80625 - DNA, 25 bp, Homo sapiens
aatgtcaaactctttacattttgga

SEQ ID NO: 80626 - DNA, 25 bp, Homo sapiens
ggcacccgtaagtatttccacaaag

SEQ ID NO: 80627 - DNA, 25 bp, Homo sapiens
tgcccttaagcctagagatattttg

SEQ ID NO: 80628 - DNA, 25 bp, Homo sapiens
tggcactgcccataaaaaagttgtg

SEQ ID NO: 80629 - DNA, 25 bp, Homo sapiens
gcttggatacacaagctactgcttg

SEQ ID NO: 80630 - DNA, 25 bp, Homo sapiens
ataggctcaaatctccatgtcaggg

SEQ ID NO: 80631 - DNA, 25 bp, Homo sapiens
caagggacaagtcaagtctacatca

SEQ ID NO: 80632 - DNA, 25 bp, Homo sapiens
gtttttgagaaattgctgatatatc

SEQ ID NO: 80633 - DNA, 25 bp, Homo sapiens
taatattaggggacttatgtcatat

SEQ ID NO: 80634 - DNA, 25 bp, Homo sapiens
tggttaccgggatagccacattacc

SEQ ID NO: 80635 - DNA, 25 bp, Homo sapiens
attaatacccttaattttacagaag

SEQ ID NO: 80636 - DNA, 25 bp, Homo sapiens
tctgttattgaagggcactgactta

SEQ ID NO: 80637 - DNA, 25 bp, Homo sapiens
tggaccaaggtatatctgacaattc

SEQ ID NO: 80638 - DNA, 25 bp, Homo sapiens
cctgttggggatgcaaattagctca

SEQ ID NO: 80639 - DNA, 25 bp, Homo sapiens
tccacactgggctgaatatatcctg

SEQ ID NO: 80640 - DNA, 25 bp, Homo sapiens
gcaaactgttgaattgttaaaccta

SEQ ID NO: 80641 - DNA, 25 bp, Homo sapiens
tttagacattgtgaatccccctcct

SEQ ID NO: 80642 - DNA, 25 bp, Homo sapiens
tccttatagcttctggggactaatc

SEQ ID NO: 80643 - DNA, 25 bp, Homo sapiens
agtgcattcagtttgctgtatccca

SEQ ID NO: 80644 - DNA, 25 bp, Homo sapiens
aataattttatacttcataagtttg

SEQ ID NO: 80645 - DNA, 25 bp, Homo sapiens
cttcggtctggtagaacataactga

SEQ ID NO: 80646 - DNA, 25 bp, Homo sapiens
ttagtgaaatgtctgccgtggcctc

SEQ ID NO: 80647 - DNA, 25 bp, Homo sapiens
atgcatcagtgctcaaggtacagtg

SEQ ID NO: 80648 - DNA, 25 bp, Homo sapiens
gagattctctggacaacttagtttg

SEQ ID NO: 80649 - DNA, 25 bp, Homo sapiens
tgttgtttttatgttcagattcaaa

SEQ ID NO: 80650 - DNA, 25 bp, Homo sapiens
aagctctaagcatggggtcacttca

SEQ ID NO: 80651 - DNA, 25 bp, Homo sapiens
cgtggagcaggaatacttgatatta

SEQ ID NO: 80652 - DNA, 25 bp, Homo sapiens
gcatagcaatcaagcaagaccccca

SEQ ID NO: 80653 - DNA, 25 bp, Homo sapiens
aactcttttggtatatagcagggca

SEQ ID NO: 80654 - DNA, 25 bp, Homo sapiens
cgagtcagtgtctaagtcaaggata

SEQ ID NO: 80655 - DNA, 25 bp, Homo sapiens
tctactctagagtattggaataaaa

SEQ ID NO: 80656 - DNA, 25 bp, Homo sapiens
ggcattgttttcactggggctttaa

SEQ ID NO: 80657 - DNA, 25 bp, Homo sapiens
actcactcatcatggggcttcatta

SEQ ID NO: 80658 - DNA, 25 bp, Homo sapiens
ggtggtggtggtggggtgtgtatgt

SEQ ID NO: 80659 - DNA, 25 bp, Homo sapiens
ccctgctgggaatcttcagttgaaa

SEQ ID NO: 80660 - DNA, 25 bp, Homo sapiens
tctttagtggttgttgaccattttg

SEQ ID NO: 80661 - DNA, 25 bp, Homo sapiens
ggctggtctacctactcagttactg

SEQ ID NO: 80662 - DNA, 25 bp, Homo sapiens
cctcagctaaggcacacagaatgtt

SEQ ID NO: 80663 - DNA, 25 bp, Homo sapiens
tgttggcctccatacccattctgtg

SEQ ID NO: 80664 - DNA, 25 bp, Homo sapiens
gcatatttttattggagtgggttta

SEQ ID NO: 80665 - DNA, 25 bp, Homo sapiens
gtttctgccacaatgactcagtgtg

SEQ ID NO: 80666 - DNA, 25 bp, Homo sapiens
tggcaggccatcactctaagcagga

SEQ ID NO: 80667 - DNA, 25 bp, Homo sapiens
ttgggtgtacctccagatctaattc

SEQ ID NO: 80668 - DNA, 25 bp, Homo sapiens
tttttaagatacagacacagtggcc

SEQ ID NO: 80669 - DNA, 25 bp, Homo sapiens
taaagcccaggttaggaggatttcc

SEQ ID NO: 80670 - DNA, 25 bp, Homo sapiens
gcccacaaactcaaatgccgtcagg

SEQ ID NO: 80671 - DNA, 25 bp, Homo sapiens
tcccatatctgaccctgaaggcttg

SEQ ID NO: 80672 - DNA, 25 bp, Homo sapiens
tcttggggaatacacatagcttctc

SEQ ID NO: 80673 - DNA, 25 bp, Homo sapiens
caaggaggcctcctgaacatgttca

SEQ ID NO: 80674 - DNA, 25 bp, Homo sapiens
tcatggtaaagagcagcccgacatc

SEQ ID NO: 80675 - DNA, 25 bp, Homo sapiens
atatgtgttatgctagagtgaattg

SEQ ID NO: 80676 - DNA, 25 bp, Homo sapiens
tcagaggatgtaggaaatgacattg

SEQ ID NO: 80677 - DNA, 25 bp, Homo sapiens
ccttggtagttttagaggttacaca

SEQ ID NO: 80678 - DNA, 25 bp, Homo sapiens
tgtgccacagactatttaacagttc

SEQ ID NO: 80679 - DNA, 25 bp, Homo sapiens
taaaactctgtaaatctgcttggtg

SEQ ID NO: 80680 - DNA, 25 bp, Homo sapiens
cagcgaaactttgatccaggacttt

SEQ ID NO: 80681 - DNA, 25 bp, Homo sapiens
agtgttccacttttctccctgtagc

SEQ ID NO: 80682 - DNA, 25 bp, Homo sapiens
gccctgttagattggtcatgtattt

SEQ ID NO: 80683 - DNA, 25 bp, Homo sapiens
aggctcttggatttattctgcatta

SEQ ID NO: 80684 - DNA, 25 bp, Homo sapiens
tggttgttaatctaagaaaatcaaa

SEQ ID NO: 80685 - DNA, 25 bp, Homo sapiens
tcccagtgggagaaggtatccctta

SEQ ID NO: 80686 - DNA, 25 bp, Homo sapiens
tcagcatctacttgggattctttgc

SEQ ID NO: 80687 - DNA, 25 bp, Homo sapiens
actccagttggtgggctgacattta

SEQ ID NO: 80688 - DNA, 25 bp, Homo sapiens
gctgggcaggtaccacttcagagta

SEQ ID NO: 80689 - DNA, 25 bp, Homo sapiens
catcatcatttgtctagagatctga

SEQ ID NO: 80690 - DNA, 25 bp, Homo sapiens
caaatgtgggtcatgagaatactcc

SEQ ID NO: 80691 - DNA, 25 bp, Homo sapiens
gggctgcccagaaataatcaagttt

SEQ ID NO: 80692 - DNA, 25 bp, Homo sapiens
agtcatagctagtaacctccaggtt

SEQ ID NO: 80693 - DNA, 25 bp, Homo sapiens
cagttcagggatctcctccagaatc

SEQ ID NO: 80694 - DNA, 25 bp, Homo sapiens
cgtcatgatggagatagggatcctc

SEQ ID NO: 80695 - DNA, 25 bp, Homo sapiens
tgcttctccagacatgcctttgatt

SEQ ID NO: 80696 - DNA, 25 bp, Homo sapiens
atataattattttgcatgctgtccc

SEQ ID NO: 80697 - DNA, 25 bp, Homo sapiens
aaattttattcagagaatcaggtgg

SEQ ID NO: 80698 - DNA, 25 bp, Homo sapiens
tctggctgttctgcaatgtaaaatt

SEQ ID NO: 80699 - DNA, 25 bp, Homo sapiens
tgcactagctcaccaattaacattg

SEQ ID NO: 80700 - DNA, 25 bp, Homo sapiens
aagccttctggaaagactcttctga

SEQ ID NO: 80701 - DNA, 25 bp, Homo sapiens
cacgttaatttttggctagttcaca

SEQ ID NO: 80702 - DNA, 25 bp, Homo sapiens
gaacactgcctataaaactcccatg

SEQ ID NO: 80703 - DNA, 25 bp, Homo sapiens
ctcacgaggctgttttggacttatc

SEQ ID NO: 80704 - DNA, 25 bp, Homo sapiens
ggagcaggtctctctagttttacta

SEQ ID NO: 80705 - DNA, 25 bp, Homo sapiens
tggctcacagagattcatacgtttc

SEQ ID NO: 80706 - DNA, 25 bp, Homo sapiens
tgctctggtagtgcaatcagcttta

SEQ ID NO: 80707 - DNA, 25 bp, Homo sapiens
ggtcagctgcaaactcctagtaata

SEQ ID NO: 80708 - DNA, 25 bp, Homo sapiens
tggtcatacgttttctcacaacaga

SEQ ID NO: 80709 - DNA, 25 bp, Homo sapiens
tttcgtcgagagattaatgcaagtc

SEQ ID NO: 80710 - DNA, 25 bp, Homo sapiens
tttcactatccggtagggtccctta

SEQ ID NO: 80711 - DNA, 25 bp, Homo sapiens
cacttcagtggcagcttttctgtta

SEQ ID NO: 80712 - DNA, 25 bp, Homo sapiens
catgagtggtttagcctccattaaa

SEQ ID NO: 80713 - DNA, 25 bp, Homo sapiens
gccagttggccctgtgctgcaataa

SEQ ID NO: 80714 - DNA, 25 bp, Homo sapiens
actgtttggtctcccatggccatta

SEQ ID NO: 80715 - DNA, 25 bp, Homo sapiens
tgctacatggaggaacagttttata

SEQ ID NO: 80716 - DNA, 25 bp, Homo sapiens
agctggcccttcaggagttctcaca

SEQ ID NO: 80717 - DNA, 25 bp, Homo sapiens
cctaccgggtgaagaaatgatgaca

SEQ ID NO: 80718 - DNA, 25 bp, Homo sapiens
gtaatacttacataagtaatagaaa

SEQ ID NO: 80719 - DNA, 25 bp, Homo sapiens
ctgggacagagtacacatatggatt

SEQ ID NO: 80720 - DNA, 25 bp, Homo sapiens
atgtgcacttgcctgaacttctata

SEQ ID NO: 80721 - DNA, 25 bp, Homo sapiens
ggcagctaactactctttactttta

SEQ ID NO: 80722 - DNA, 25 bp, Homo sapiens
atggcaggtttgagaaattcttccc

SEQ ID NO: 80723 - DNA, 25 bp, Homo sapiens
gcaccctgggtgtcagattttccta

SEQ ID NO: 80724 - DNA, 25 bp, Homo sapiens
gcgcacagatgcacagaaatacctc

SEQ ID NO: 80725 - DNA, 25 bp, Homo sapiens
gggctttcagtgctgacacacctta

SEQ ID NO: 80726 - DNA, 25 bp, Homo sapiens
tcaagtcacatcagaaggttggctc

SEQ ID NO: 80727 - DNA, 25 bp, Homo sapiens
tgatgctcaagtgggacctactatg

SEQ ID NO: 80728 - DNA, 25 bp, Homo sapiens
ctagctatttattcatgtgtgcaat

SEQ ID NO: 80729 - DNA, 25 bp, Homo sapiens
ggatcaatggacagacatagctata

SEQ ID NO: 80730 - DNA, 25 bp, Homo sapiens
tttttacaaacaaatttatatttgc

SEQ ID NO: 80731 - DNA, 25 bp, Homo sapiens
tcagagcataggtcatgttcaaatg

SEQ ID NO: 80732 - DNA, 25 bp, Homo sapiens
gaaaaagcccataactgacagtctg

SEQ ID NO: 80733 - DNA, 25 bp, Homo sapiens
agtgtcaaactttctaaggcatttc

SEQ ID NO: 80734 - DNA, 25 bp, Homo sapiens
ttcagtgagggaaccagatgccaga

SEQ ID NO: 80735 - DNA, 25 bp, Homo sapiens
gaagctgccttttagattatttgta

SEQ ID NO: 80736 - DNA, 25 bp, Homo sapiens
tgttagcatagcaaactgattggtc

SEQ ID NO: 80737 - DNA, 25 bp, Homo sapiens
accttgctggcatatcctgtagata

SEQ ID NO: 80738 - DNA, 25 bp, Homo sapiens
gtcttgatcctttgaggcccacatc

SEQ ID NO: 80739 - DNA, 25 bp, Homo sapiens
actggggctgaacacttgagttttc

SEQ ID NO: 80740 - DNA, 25 bp, Homo sapiens
cacactgtctggctgaattatattc

SEQ ID NO: 80741 - DNA, 25 bp, Homo sapiens
tccagtgattttctctttcttaaca

SEQ ID NO: 80742 - DNA, 25 bp, Homo sapiens
cgccagcgtatatagttcagcaatc

SEQ ID NO: 80743 - DNA, 25 bp, Homo sapiens
accatgggagaatgttggttcttca

SEQ ID NO: 80744 - DNA, 25 bp, Homo sapiens
cttaggcgtgggaagaaatgtactc

SEQ ID NO: 80745 - DNA, 25 bp, Homo sapiens
gcttgtctttctctcgattcctgta

SEQ ID NO: 80746 - DNA, 25 bp, Homo sapiens
tggccctgatctcttgaagcctttc

SEQ ID NO: 80747 - DNA, 25 bp, Homo sapiens
gagccttcgatttctagttcacatg

SEQ ID NO: 80748 - DNA, 25 bp, Homo sapiens
cttatatttcagtaaaaagccttga

SEQ ID NO: 80749 - DNA, 25 bp, Homo sapiens
aaaaattaaaaagtctttatatggc

SEQ ID NO: 80750 - DNA, 25 bp, Homo sapiens
gcagcgaagacgtgtgatctctatc

SEQ ID NO: 80751 - DNA, 25 bp, Homo sapiens
ggccggacggatccacatctgtttt

SEQ ID NO: 80752 - DNA, 25 bp, Homo sapiens
gtgggcagaatttcctctgtatctc

SEQ ID NO: 80753 - DNA, 25 bp, Homo sapiens
tgcactcctgatccttcataaaggg

SEQ ID NO: 80754 - DNA, 25 bp, Homo sapiens
gcatgaagctcccagatcagtgtta

SEQ ID NO: 80755 - DNA, 25 bp, Homo sapiens
cttttttctccctttatatttttcc

SEQ ID NO: 80756 - DNA, 25 bp, Homo sapiens
cacgaactcttttctaactgggaga

SEQ ID NO: 80757 - DNA, 25 bp, Homo sapiens
caatccggcacaactgggaaaaacc

SEQ ID NO: 80758 - DNA, 25 bp, Homo sapiens
cttggcgtcgcagcaatattccgga

SEQ ID NO: 80759 - DNA, 25 bp, Homo sapiens
cccaggtatcgtagcggcgacacga

SEQ ID NO: 80760 - DNA, 25 bp, Homo sapiens
tgcgtatgttctgtccacccagcta

SEQ ID NO: 80761 - DNA, 25 bp, Homo sapiens
ggcaggcatttttcgttgttaacaa

SEQ ID NO: 80762 - DNA, 25 bp, Homo sapiens
agatatttcattcttaacaatactg

SEQ ID NO: 80763 - DNA, 25 bp, Homo sapiens
ggggcctactgtatgccaagttaaa

SEQ ID NO: 80764 - DNA, 25 bp, Homo sapiens
gcctactgtgtgcaaggtatagacc

SEQ ID NO: 80765 - DNA, 25 bp, Homo sapiens
attttcttttaagcctattgaatga

SEQ ID NO: 80766 - DNA, 25 bp, Homo sapiens
ctctgaaaccagatagctttggcta

SEQ ID NO: 80767 - DNA, 25 bp, Homo sapiens
ccaagctggtacaaggtgttcgacc

SEQ ID NO: 80768 - DNA, 25 bp, Homo sapiens
tgacagtgttttctcttcaggagaa

SEQ ID NO: 80769 - DNA, 25 bp, Homo sapiens
gcagttctcacggagaggccaagta

SEQ ID NO: 80770 - DNA, 25 bp, Homo sapiens
accgcgggtatgacaaggcagaccg

SEQ ID NO: 80771 - DNA, 25 bp, Homo sapiens
cttgactcagtacgtggacaccatc

SEQ ID NO: 80772 - DNA, 25 bp, Homo sapiens
gcctccctggccctgggttaaaata

SEQ ID NO: 80773 - DNA, 25 bp, Homo sapiens
ggctaggaacccttcaccttggtga

SEQ ID NO: 80774 - DNA, 25 bp, Homo sapiens
caggaggcaggttccacagttcatc

SEQ ID NO: 80775 - DNA, 25 bp, Homo sapiens
tgccagaagggctgatgcaaaaatc

SEQ ID NO: 80776 - DNA, 25 bp, Homo sapiens
tctagagctcccattaaacgttgtg

SEQ ID NO: 80777 - DNA, 25 bp, Homo sapiens
gcaacacaggggtcaaatggcatca

SEQ ID NO: 80778 - DNA, 25 bp, Homo sapiens
ctactggagggtcaaccacttatta

SEQ ID NO: 80779 - DNA, 25 bp, Homo sapiens
gtgcttttgatacctacaggctttg

SEQ ID NO: 80780 - DNA, 25 bp, Homo sapiens
ttggggttgacctactctcagaaga

SEQ ID NO: 80781 - DNA, 25 bp, Homo sapiens
agggtgcactccttcctacagcaaa

SEQ ID NO: 80782 - DNA, 25 bp, Homo sapiens
caggacccttcagcatgtcaggtta

SEQ ID NO: 80783 - DNA, 25 bp, Homo sapiens
cctgcttggtgaaatttgggagaca

SEQ ID NO: 80784 - DNA, 25 bp, Homo sapiens
tggccacctgctgatggacatcata

SEQ ID NO: 80785 - DNA, 25 bp, Homo sapiens
gctaaacagatacttgttgaaagca

SEQ ID NO: 80786 - DNA, 25 bp, Homo sapiens
tctttaaaatttcataaaaatcaca

SEQ ID NO: 80787 - DNA, 25 bp, Homo sapiens
tccaggatacgtccagaaatggttc

SEQ ID NO: 80788 - DNA, 25 bp, Homo sapiens
atctcgccatacaggggttttccta

SEQ ID NO: 80789 - DNA, 25 bp, Homo sapiens
ctagaggcagtcttctggtcaattc

SEQ ID NO: 80790 - DNA, 25 bp, Homo sapiens
gtttgttacttctgtctgtatgtgt

SEQ ID NO: 80791 - DNA, 25 bp, Homo sapiens
ttggtgaaagacatcatttgtagtg

SEQ ID NO: 80792 - DNA, 25 bp, Homo sapiens
tcttgggtgcaggtttttatatata

SEQ ID NO: 80793 - DNA, 25 bp, Homo sapiens
gtccctcatttcctctgctgctttg

SEQ ID NO: 80794 - DNA, 25 bp, Homo sapiens
tgtaccaaaggtcccagaagagttc

SEQ ID NO: 80795 - DNA, 25 bp, Homo sapiens
tatccaggtggctgtataacattat

SEQ ID NO: 80796 - DNA, 25 bp, Homo sapiens
gccatctccgcaaggtttttatctg

SEQ ID NO: 80797 - DNA, 25 bp, Homo sapiens
atttgacgtggccttttctgaaaca

SEQ ID NO: 80798 - DNA, 25 bp, Homo sapiens
ttcttggtatacatggcggctggtc

SEQ ID NO: 80799 - DNA, 25 bp, Homo sapiens
atatttaaagaattattcaagcttc

SEQ ID NO: 80800 - DNA, 25 bp, Homo sapiens
tcattgatatgtttaaggattttcc

SEQ ID NO: 80801 - DNA, 25 bp, Homo sapiens
tcaaataatataggatatgacattt

SEQ ID NO: 80802 - DNA, 25 bp, Homo sapiens
tttctctgcaaagatagggaagata

SEQ ID NO: 80803 - DNA, 25 bp, Homo sapiens
ttttaaaaattaacaatgtaggtga

SEQ ID NO: 80804 - DNA, 25 bp, Homo sapiens
gtgtaagtgttctctgccaggtaga

SEQ ID NO: 80805 - DNA, 25 bp, Homo sapiens
gtgcaactgtgatccatgggccttc

SEQ ID NO: 80806 - DNA, 25 bp, Homo sapiens
ggggactactgatcacatgttcttg

SEQ ID NO: 80807 - DNA, 25 bp, Homo sapiens
aggtaagttgatagctcctcattgc

SEQ ID NO: 80808 - DNA, 25 bp, Homo sapiens
tgggctgctgtaccagataaatcca

SEQ ID NO: 80809 - DNA, 25 bp, Homo sapiens
cctgtagcttcctgagtgagattgc

SEQ ID NO: 80810 - DNA, 25 bp, Homo sapiens
ggcatgggccaagtagtatctagta

SEQ ID NO: 80811 - DNA, 25 bp, Homo sapiens
aggcagtatctcttctatctgtctc

SEQ ID NO: 80812 - DNA, 25 bp, Homo sapiens
gggcctcctcagatccttgcattta

SEQ ID NO: 80813 - DNA, 25 bp, Homo sapiens
attgtgaagaagacagggcctgtta

SEQ ID NO: 80814 - DNA, 25 bp, Homo sapiens
tattcaagatatcttaagccacatt

SEQ ID NO: 80815 - DNA, 25 bp, Homo sapiens
cccttgagggtaatctgtctttatg

SEQ ID NO: 80816 - DNA, 25 bp, Homo sapiens
aaaaataccatgtgcccaccaaaaa

SEQ ID NO: 80817 - DNA, 25 bp, Homo sapiens
gtttcagttactattttattacgaa

SEQ ID NO: 80818 - DNA, 25 bp, Homo sapiens
ctgagctctctagatccagttagca

SEQ ID NO: 80819 - DNA, 25 bp, Homo sapiens
agctgctgctgatcctctagagttg

SEQ ID NO: 80820 - DNA, 25 bp, Homo sapiens
ccaatggggagctttgcagttcttc

SEQ ID NO: 80821 - DNA, 25 bp, Homo sapiens
tttgggcccttaggaaaccagctca

SEQ ID NO: 80822 - DNA, 25 bp, Homo sapiens
gggcagctctgttactctacttgtg

SEQ ID NO: 80823 - DNA, 25 bp, Homo sapiens
caggccttggatggacagactcata

SEQ ID NO: 80824 - DNA, 25 bp, Homo sapiens
gccactggcctcttcattgtcaata

SEQ ID NO: 80825 - DNA, 25 bp, Homo sapiens
atttgctgcattccaggaccggcta

SEQ ID NO: 80826 - DNA, 25 bp, Homo sapiens
atgggtctggggtcctttttattcc

SEQ ID NO: 80827 - DNA, 25 bp, Homo sapiens
caccaccttgcctgggtagattcca

SEQ ID NO: 80828 - DNA, 25 bp, Homo sapiens
tgcgactgcctttcatctggagata

SEQ ID NO: 80829 - DNA, 25 bp, Homo sapiens
ctgctgtgtctgttgggaagtacca

SEQ ID NO: 80830 - DNA, 25 bp, Homo sapiens
cccaggacaatgagctgactgtcta

SEQ ID NO: 80831 - DNA, 25 bp, Homo sapiens
atccaatgttgcacctctatgaggc

SEQ ID NO: 80832 - DNA, 25 bp, Homo sapiens
accttgcctaccctgtgagaatatg

SEQ ID NO: 80833 - DNA, 25 bp, Homo sapiens
gggtttcccactctgaccactgatc

SEQ ID NO: 80834 - DNA, 25 bp, Homo sapiens
taagctcttctcataggaatgggtc

SEQ ID NO: 80835 - DNA, 25 bp, Homo sapiens
tggccaagaccaaagcattcaattc

SEQ ID NO: 80836 - DNA, 25 bp, Homo sapiens
caggacctgccttccactatggagt

SEQ ID NO: 80837 - DNA, 25 bp, Homo sapiens
tgcagtggtcccaatattcaaagta

SEQ ID NO: 80838 - DNA, 25 bp, Homo sapiens
ctggatgctgccgttaccttaaatg

SEQ ID NO: 80839 - DNA, 25 bp, Homo sapiens
acttgtctcttttgtgctgcctaaa

SEQ ID NO: 80840 - DNA, 25 bp, Homo sapiens
agtaaataaagtggaaaaaactcta

SEQ ID NO: 80841 - DNA, 25 bp, Homo sapiens
tatcgagagcgaaggaaagtcattc

SEQ ID NO: 80842 - DNA, 25 bp, Homo sapiens
gaccaatgtgctagggactcagcta

SEQ ID NO: 80843 - DNA, 25 bp, Homo sapiens
gcagacctgtggtgccaattctatc

SEQ ID NO: 80844 - DNA, 25 bp, Homo sapiens
ttctcatacctaggcttcagggtcc

SEQ ID NO: 80845 - DNA, 25 bp, Homo sapiens
cttcaaaactaggatgtttatttat

SEQ ID NO: 80846 - DNA, 25 bp, Homo sapiens
atctcttttcttatggaacttccat

SEQ ID NO: 80847 - DNA, 25 bp, Homo sapiens
ggcaggtattggctttcaactttaa

SEQ ID NO: 80848 - DNA, 25 bp, Homo sapiens
cccaggggcatgttcttagacagta

SEQ ID NO: 80849 - DNA, 25 bp, Homo sapiens
ccctggtaatctgcctggtacattt

SEQ ID NO: 80850 - DNA, 25 bp, Homo sapiens
tggcaccttgtgaatcctcaatctg

SEQ ID NO: 80851 - DNA, 25 bp, Homo sapiens
tccttctggccacagtctcatgtta

SEQ ID NO: 80852 - DNA, 25 bp, Homo sapiens
tggatgcctctttccgtccctaatg

SEQ ID NO: 80853 - DNA, 25 bp, Homo sapiens
atggtcttgatcagaggcttgactg

SEQ ID NO: 80854 - DNA, 25 bp, Homo sapiens
cactttagaccgtttgactttattg

SEQ ID NO: 80855 - DNA, 25 bp, Homo sapiens
gtggaaggtcttgttctcaattctc

SEQ ID NO: 80856 - DNA, 25 bp, Homo sapiens
gctggaaggggcgcagcagctgtgc

SEQ ID NO: 80857 - DNA, 25 bp, Homo sapiens
tccggcagcaagaagggtgtaaacc

SEQ ID NO: 80858 - DNA, 25 bp, Homo sapiens
gaccaccgggtgaacttggctatga

SEQ ID NO: 80859 - DNA, 25 bp, Homo sapiens
cccgttgttatagagcctacctgta

SEQ ID NO: 80860 - DNA, 25 bp, Homo sapiens
aaaattacttcaaaggcgtgagaaa

SEQ ID NO: 80861 - DNA, 25 bp, Homo sapiens
acgtgctagttaatgcttttagaaa

SEQ ID NO: 80862 - DNA, 25 bp, Homo sapiens
ctacgatggcagaaacttcgttttg

SEQ ID NO: 80863 - DNA, 25 bp, Homo sapiens
gggcttctattgtcctccttcttta

SEQ ID NO: 80864 - DNA, 25 bp, Homo sapiens
tcccatgcctttgaagtaatttttc

SEQ ID NO: 80865 - DNA, 25 bp, Homo sapiens
ggccagtttctaaaatcagtcaaga

SEQ ID NO: 80866 - DNA, 25 bp, Homo sapiens
ggccagcctcccataagtgttatca

SEQ ID NO: 80867 - DNA, 25 bp, Homo sapiens
atatatatacacactagtattccat

SEQ ID NO: 80868 - DNA, 25 bp, Homo sapiens
gatataaaagtaatttgtaattttc

SEQ ID NO: 80869 - DNA, 25 bp, Homo sapiens
ataaactatatatataaaaccctac

SEQ ID NO: 80870 - DNA, 25 bp, Homo sapiens
gaaagtgtgacccatgaagtcacac

SEQ ID NO: 80871 - DNA, 25 bp, Homo sapiens
gtgaccttgtctcttatagtttttg

SEQ ID NO: 80872 - DNA, 25 bp, Homo sapiens
taatttcttttttttatgaacacga

SEQ ID NO: 80873 - DNA, 25 bp, Homo sapiens
ggcccagagcctagcactattcttt

SEQ ID NO: 80874 - DNA, 25 bp, Homo sapiens
ctaggtgtgtatatagggtgaaaac

SEQ ID NO: 80875 - DNA, 25 bp, Homo sapiens
tctctcaggttctctgtaaacttta

SEQ ID NO: 80876 - DNA, 25 bp, Homo sapiens
tgcgtgatagcaatataggccttaa

SEQ ID NO: 80877 - DNA, 25 bp, Homo sapiens
ctttttttttaacggaaataccatg

SEQ ID NO: 80878 - DNA, 25 bp, Homo sapiens
caataactgattttatataactgat

SEQ ID NO: 80879 - DNA, 25 bp, Homo sapiens
agttctggcctcttacctcctggta

SEQ ID NO: 80880 - DNA, 25 bp, Homo sapiens
ggcaaggcagtactcttaacaggtc

SEQ ID NO: 80881 - DNA, 25 bp, Homo sapiens
gcttgggctgtccacatagcattca

SEQ ID NO: 80882 - DNA, 25 bp, Homo sapiens
caggggcccttaatcagtgtttgta

SEQ ID NO: 80883 - DNA, 25 bp, Homo sapiens
cagtaaatccactgttttctaatat

SEQ ID NO: 80884 - DNA, 25 bp, Homo sapiens
gcatttgtcttttaaattctataca

SEQ ID NO: 80885 - DNA, 25 bp, Homo sapiens
agatcatatatgttaagttcccagc

SEQ ID NO: 80886 - DNA, 25 bp, Homo sapiens
ctctgcccttctctgctggataaca

SEQ ID NO: 80887 - DNA, 25 bp, Homo sapiens
tgggctccagatcctaaaacaattg

SEQ ID NO: 80888 - DNA, 25 bp, Homo sapiens
cctgccaggatgctttggtaatata

SEQ ID NO: 80889 - DNA, 25 bp, Homo sapiens
actggaatgagtggccctgtgatta

SEQ ID NO: 80890 - DNA, 25 bp, Homo sapiens
gggcctgagactcctaggataaaca

SEQ ID NO: 80891 - DNA, 25 bp, Homo sapiens
ggaatgcctatgtacagtctgaccc

SEQ ID NO: 80892 - DNA, 25 bp, Homo sapiens
tatcatcactggcctagtacaggct

SEQ ID NO: 80893 - DNA, 25 bp, Homo sapiens
tctttaaggcctacttctgagaagc

SEQ ID NO: 80894 - DNA, 25 bp, Homo sapiens
ccttttaaaggacaagaagctgctg

SEQ ID NO: 80895 - DNA, 25 bp, Homo sapiens
agctgcccagggcttcatgtttatc

SEQ ID NO: 80896 - DNA, 25 bp, Homo sapiens
ggggcagatcacgtaggccttattg

SEQ ID NO: 80897 - DNA, 25 bp, Homo sapiens
acataggcttccaagacggtcttta

SEQ ID NO: 80898 - DNA, 25 bp, Homo sapiens
tagagctcctgacaatttgccattg

SEQ ID NO: 80899 - DNA, 25 bp, Homo sapiens
taataatgttataactccatctcaa

SEQ ID NO: 80900 - DNA, 25 bp, Homo sapiens
atggtgattttaggtttcatactga

SEQ ID NO: 80901 - DNA, 25 bp, Homo sapiens
catataatatatgcaatatattgtg

SEQ ID NO: 80902 - DNA, 25 bp, Homo sapiens
ttataacaagttctgggagctccca

SEQ ID NO: 80903 - DNA, 25 bp, Homo sapiens
tggtcacctatgttcaggccatatg

SEQ ID NO: 80904 - DNA, 25 bp, Homo sapiens
ttgtactcttgtaacgatccaaaga

SEQ ID NO: 80905 - DNA, 25 bp, Homo sapiens
aaaggttgtgtgtgtatatttggga

SEQ ID NO: 80906 - DNA, 25 bp, Homo sapiens
ggaagtgaatgtccatcatagtttc

SEQ ID NO: 80907 - DNA, 25 bp, Homo sapiens
aagtccaccttcagtgcaaaaaaaa

SEQ ID NO: 80908 - DNA, 25 bp, Homo sapiens
aataattgaattccatttttctacc

SEQ ID NO: 80909 - DNA, 25 bp, Homo sapiens
ctatcaagttttaaaattaaccttg

SEQ ID NO: 80910 - DNA, 25 bp, Homo sapiens
aatcgggcttcgttttttgcaatcc

SEQ ID NO: 80911 - DNA, 25 bp, Homo sapiens
gctttacaattttattagaactggt

SEQ ID NO: 80912 - DNA, 25 bp, Homo sapiens
ttattctttataaacagagtttgag

SEQ ID NO: 80913 - DNA, 25 bp, Homo sapiens
ggctgctgtgccttcagacatggaa

SEQ ID NO: 80914 - DNA, 25 bp, Homo sapiens
ccattgactattgttgtccaggtta

SEQ ID NO: 80915 - DNA, 25 bp, Homo sapiens
aaataaagtagttggctaggtttac

SEQ ID NO: 80916 - DNA, 25 bp, Homo sapiens
taacatggttttgtttaaagaagat

SEQ ID NO: 80917 - DNA, 25 bp, Homo sapiens
ttctctgaagtctactcgtgggttg

SEQ ID NO: 80918 - DNA, 25 bp, Homo sapiens
tcagtggagcattttagggacattg

SEQ ID NO: 80919 - DNA, 25 bp, Homo sapiens
tttaaaaaaaaagagtgttgttact

SEQ ID NO: 80920 - DNA, 25 bp, Homo sapiens
ctaaacaatgataccactggaattc

SEQ ID NO: 80921 - DNA, 25 bp, Homo sapiens
acacccagccattgagttcctatct

SEQ ID NO: 80922 - DNA, 25 bp, Homo sapiens
gaactgatttcaatggagggaagga

SEQ ID NO: 80923 - DNA, 25 bp, Homo sapiens
gcaggtacatgttagttcaggcttc

SEQ ID NO: 80924 - DNA, 25 bp, Homo sapiens
cctgggaaccataacagcttagttt

SEQ ID NO: 80925 - DNA, 25 bp, Homo sapiens
caaacagtaacaggatcaggcatta

SEQ ID NO: 80926 - DNA, 25 bp, Homo sapiens
taataataaaaagcacaacaacaac

SEQ ID NO: 80927 - DNA, 25 bp, Homo sapiens
gtgaaggtttccatgctgcctaaca

SEQ ID NO: 80928 - DNA, 25 bp, Homo sapiens
accaatggctatattttcaggggca

SEQ ID NO: 80929 - DNA, 25 bp, Homo sapiens
tagaaccacttgaaaaccgcccttg

SEQ ID NO: 80930 - DNA, 25 bp, Homo sapiens
gggccggtggtcaaaacaaaggtta

SEQ ID NO: 80931 - DNA, 25 bp, Homo sapiens
ttcccttggggaaagcctatgatgc

SEQ ID NO: 80932 - DNA, 25 bp, Homo sapiens
ccagcatggtcacaggatagttttc

SEQ ID NO: 80933 - DNA, 25 bp, Homo sapiens
tatatagaaataaggaacacacaaa

SEQ ID NO: 80934 - DNA, 25 bp, Homo sapiens
tggccagcctggcagcactatctta

SEQ ID NO: 80935 - DNA, 25 bp, Homo sapiens
aggtcaccgttgcactttctcctga

SEQ ID NO: 80936 - DNA, 25 bp, Homo sapiens
ggcatattcccattacccgtctagg

SEQ ID NO: 80937 - DNA, 25 bp, Homo sapiens
caagtatctaagtctgagtggttga

SEQ ID NO: 80938 - DNA, 25 bp, Homo sapiens
ggagactgctgcctttgaaaaacca

SEQ ID NO: 80939 - DNA, 25 bp, Homo sapiens
gacctcatgtttctttctagctgca

SEQ ID NO: 80940 - DNA, 25 bp, Homo sapiens
ttccaaggcagggactaaattcttc

SEQ ID NO: 80941 - DNA, 25 bp, Homo sapiens
ggacctgcctgccactaagttataa

SEQ ID NO: 80942 - DNA, 25 bp, Homo sapiens
agccggtggctcattgtgttcatta

SEQ ID NO: 80943 - DNA, 25 bp, Homo sapiens
cccttaggatagatgtgttggaccc

SEQ ID NO: 80944 - DNA, 25 bp, Homo sapiens
ttgggctgaactgaccaataacttc

SEQ ID NO: 80945 - DNA, 25 bp, Homo sapiens
gctcggaaccgggaaggctataaca

SEQ ID NO: 80946 - DNA, 25 bp, Homo sapiens
cctgaacctgtcaaactagtgaatg

SEQ ID NO: 80947 - DNA, 25 bp, Homo sapiens
gtctaatggcttttcagagtacgtg

SEQ ID NO: 80948 - DNA, 25 bp, Homo sapiens
caaagaatactgtggctgccctata

SEQ ID NO: 80949 - DNA, 25 bp, Homo sapiens
taagacatcttttggaggcaggaaa

SEQ ID NO: 80950 - DNA, 25 bp, Homo sapiens
ggtttcctgaattacactgctgcca

SEQ ID NO: 80951 - DNA, 25 bp, Homo sapiens
gtaggtagttattcttgtctcctat

SEQ ID NO: 80952 - DNA, 25 bp, Homo sapiens
cagaccaattctccctgatgatcac

SEQ ID NO: 80953 - DNA, 25 bp, Homo sapiens
tttctttgtaagtagatgtaagtac

SEQ ID NO: 80954 - DNA, 25 bp, Homo sapiens
catgtttaaagaagaagaatgagaa

SEQ ID NO: 80955 - DNA, 25 bp, Homo sapiens
aaatattatgcaaacagtaactcaa

SEQ ID NO: 80956 - DNA, 25 bp, Homo sapiens
ttatttatttttatctgaacgcaac

SEQ ID NO: 80957 - DNA, 25 bp, Homo sapiens
tatggtcatttgcaaagttaagtct

SEQ ID NO: 80958 - DNA, 25 bp, Homo sapiens
gccaggtcagtgtgttgcataaatg

SEQ ID NO: 80959 - DNA, 25 bp, Homo sapiens
ggcagctttccaagataccttcgtg

SEQ ID NO: 80960 - DNA, 25 bp, Homo sapiens
tcaccctagtagacggtatcatttg

SEQ ID NO: 80961 - DNA, 25 bp, Homo sapiens
ctactggctatggtcactggggaaa

SEQ ID NO: 80962 - DNA, 25 bp, Homo sapiens
ttcatcaccagcaaaaacctttgtt

SEQ ID NO: 80963 - DNA, 25 bp, Homo sapiens
tcatggcaccctagctttcacctct

SEQ ID NO: 80964 - DNA, 25 bp, Homo sapiens
cacccagcagggtcctgttccatga

SEQ ID NO: 80965 - DNA, 25 bp, Homo sapiens
tgtacaagcagtctcccagggcctg

SEQ ID NO: 80966 - DNA, 25 bp, Homo sapiens
ggtcacatgcttttttctgccactg

SEQ ID NO: 80967 - DNA, 25 bp, Homo sapiens
cgtctgatagcaattaggtctcctc

SEQ ID NO: 80968 - DNA, 25 bp, Homo sapiens
cattccttggtgtcatggggttcta

SEQ ID NO: 80969 - DNA, 25 bp, Homo sapiens
aagaagccggcctttagttgtctcc

SEQ ID NO: 80970 - DNA, 25 bp, Homo sapiens
aacaggtaaaccagcccagagattg

SEQ ID NO: 80971 - DNA, 25 bp, Homo sapiens
agtggctctgtgctcctcttgataa

SEQ ID NO: 80972 - DNA, 25 bp, Homo sapiens
aaaaaaggaaattggaaagagaaag

SEQ ID NO: 80973 - DNA, 25 bp, Homo sapiens
ctacacagggaagatcagaactact

SEQ ID NO: 80974 - DNA, 25 bp, Homo sapiens
gatggaaggttggatcaatatttaa

SEQ ID NO: 80975 - DNA, 25 bp, Homo sapiens
ccacaggctggtagctcttcaaacc

SEQ ID NO: 80976 - DNA, 25 bp, Homo sapiens
aaatgaaagaacacaaaaataagtg

SEQ ID NO: 80977 - DNA, 25 bp, Homo sapiens
tcttggagggtcttaaacacttagc

SEQ ID NO: 80978 - DNA, 25 bp, Homo sapiens
ccagcttggttttggcctgacttca

SEQ ID NO: 80979 - DNA, 25 bp, Homo sapiens
catctgctcaggtgaagaattcttc

SEQ ID NO: 80980 - DNA, 25 bp, Homo sapiens
gaaaaaaaaaaagaccagttatcta

SEQ ID NO: 80981 - DNA, 25 bp, Homo sapiens
agtaccaatgtattaaatttgttgt

SEQ ID NO: 80982 - DNA, 25 bp, Homo sapiens
ggtctatctgaagtcctcaagtttt

SEQ ID NO: 80983 - DNA, 25 bp, Homo sapiens
tcctatctacctaggttaagttctc

SEQ ID NO: 80984 - DNA, 25 bp, Homo sapiens
aaaaactgcacaaagaaaaaatctt

SEQ ID NO: 80985 - DNA, 25 bp, Homo sapiens
tgaaatgaagatatataaatacatt

SEQ ID NO: 80986 - DNA, 25 bp, Homo sapiens
tcaggactattcttatacagtgtct

SEQ ID NO: 80987 - DNA, 25 bp, Homo sapiens
agcagcatgccgttttggttccaga

SEQ ID NO: 80988 - DNA, 25 bp, Homo sapiens
gaaaccctgctctcacaaactctgg

SEQ ID NO: 80989 - DNA, 25 bp, Homo sapiens
gccacacaggtttatctactcaagg

SEQ ID NO: 80990 - DNA, 25 bp, Homo sapiens
ctcctggtctctagcttgaaaaatg

SEQ ID NO: 80991 - DNA, 25 bp, Homo sapiens
tgggtgtcccacatgtcaatcagca

SEQ ID NO: 80992 - DNA, 25 bp, Homo sapiens
ctattaacatatccagtgccttctt

SEQ ID NO: 80993 - DNA, 25 bp, Homo sapiens
tggcccactattacataatggcagc

SEQ ID NO: 80994 - DNA, 25 bp, Homo sapiens
gccacgtgatgggaatctagtcttc

SEQ ID NO: 80995 - DNA, 25 bp, Homo sapiens
gcttttttgtttgctcttcttgttg

SEQ ID NO: 80996 - DNA, 25 bp, Homo sapiens
taatacacagtggaaaccatgctcc

SEQ ID NO: 80997 - DNA, 25 bp, Homo sapiens
caatgggaacttcattacctactca

SEQ ID NO: 80998 - DNA, 25 bp, Homo sapiens
cctgcctcagagacaaccatgatta

SEQ ID NO: 80999 - DNA, 25 bp, Homo sapiens
ggagaacagtctaaaccagcaatta

SEQ ID NO: 81000 - DNA, 25 bp, Homo sapiens
ataaggtatgcttgtatttgcgatg

SEQ ID NO: 81001 - DNA, 25 bp, Homo sapiens
tagccagctcctatttgccaacaag

SEQ ID NO: 81002 - DNA, 25 bp, Homo sapiens
ttggagaacgacataataaaactga

SEQ ID NO: 81003 - DNA, 25 bp, Homo sapiens
tggagacaagcatcatgaatgatca

SEQ ID NO: 81004 - DNA, 25 bp, Homo sapiens
gggcacctgtacttgggtctggtta

SEQ ID NO: 81005 - DNA, 25 bp, Homo sapiens
taaattggagaaaagttaatagaaa

SEQ ID NO: 81006 - DNA, 25 bp, Homo sapiens
aagaagtatttaaataaagaaatgg

SEQ ID NO: 81007 - DNA, 25 bp, Homo sapiens
aaaaaacttttgtaccttaaatgga

SEQ ID NO: 81008 - DNA, 25 bp, Homo sapiens
aaataatttttccaatgttttaagt

SEQ ID NO: 81009 - DNA, 25 bp, Homo sapiens
gctgaaagagagttggtgcctcaaa

SEQ ID NO: 81010 - DNA, 25 bp, Homo sapiens
ggctggcccggtttaaaagaagtgc

SEQ ID NO: 81011 - DNA, 25 bp, Homo sapiens
agggtaagtatcctcccaagtgtta

SEQ ID NO: 81012 - DNA, 25 bp, Homo sapiens
gctgagcctttaacccacatgagga

SEQ ID NO: 81013 - DNA, 25 bp, Homo sapiens
cactcagctgtagatggaaaaggtc

SEQ ID NO: 81014 - DNA, 25 bp, Homo sapiens
aaaaacagatagcaatttgatcagt

SEQ ID NO: 81015 - DNA, 25 bp, Homo sapiens
cacaaggcagtaccaggatttgaat

SEQ ID NO: 81016 - DNA, 25 bp, Homo sapiens
gttcccttctctgcctcacaagcaa

SEQ ID NO: 81017 - DNA, 25 bp, Homo sapiens
ggacttcatgccaaaaaagaaattc

SEQ ID NO: 81018 - DNA, 25 bp, Homo sapiens
ccaggtatctggctcattgacatct

SEQ ID NO: 81019 - DNA, 25 bp, Homo sapiens
tgagctctttgcctctttacccaga

SEQ ID NO: 81020 - DNA, 25 bp, Homo sapiens
ggaggaatgctacaggaatttatta

SEQ ID NO: 81021 - DNA, 25 bp, Homo sapiens
gtcactctaaaatcactgtaactac

SEQ ID NO: 81022 - DNA, 25 bp, Homo sapiens
ataaaattttcaaaacaagcttaga

SEQ ID NO: 81023 - DNA, 25 bp, Homo sapiens
aaaaaattactgcaaagtacaataa

SEQ ID NO: 81024 - DNA, 25 bp, Homo sapiens
cagccctttagagaccgcatgcaga

SEQ ID NO: 81025 - DNA, 25 bp, Homo sapiens
gagggtcctgaattctgagagctta

SEQ ID NO: 81026 - DNA, 25 bp, Homo sapiens
gaaagaacattctggtagcttggaa

SEQ ID NO: 81027 - DNA, 25 bp, Homo sapiens
atatatatggccagaataaacatct

SEQ ID NO: 81028 - DNA, 25 bp, Homo sapiens
atagcctgagtgttgagcagagaag

SEQ ID NO: 81029 - DNA, 25 bp, Homo sapiens
gagccctgggaagcatcaaaatata

SEQ ID NO: 81030 - DNA, 25 bp, Homo sapiens
tgcatgacaaaagcaacacaggtta

SEQ ID NO: 81031 - DNA, 25 bp, Homo sapiens
ctataggaaagcctcctatattaaa

SEQ ID NO: 81032 - DNA, 25 bp, Homo sapiens
catcctaggggagctgtattctgta

SEQ ID NO: 81033 - DNA, 25 bp, Homo sapiens
gagtgttcacacttatccaggatgt

SEQ ID NO: 81034 - DNA, 25 bp, Homo sapiens
gacatttttttaaatgttcaagagg

SEQ ID NO: 81035 - DNA, 25 bp, Homo sapiens
gtaaatcaaacaaacttaatctgat

SEQ ID NO: 81036 - DNA, 25 bp, Homo sapiens
gggctacctattttctgccagcata

SEQ ID NO: 81037 - DNA, 25 bp, Homo sapiens
actggataatgtcaattgacgtatt

SEQ ID NO: 81038 - DNA, 25 bp, Homo sapiens
tcaaagaatattttttgatttagag

SEQ ID NO: 81039 - DNA, 25 bp, Homo sapiens
ttctacggtcactgaagccttctcc

SEQ ID NO: 81040 - DNA, 25 bp, Homo sapiens
agaccctaaattctgtagctgcatc

SEQ ID NO: 81041 - DNA, 25 bp, Homo sapiens
gcctctgacacatctactggtcaca

SEQ ID NO: 81042 - DNA, 25 bp, Homo sapiens
cctttattatgcacaggccaagttg

SEQ ID NO: 81043 - DNA, 25 bp, Homo sapiens
gtctccccacctaaattctacattc

SEQ ID NO: 81044 - DNA, 25 bp, Homo sapiens
cttgctcagaattgggcagaaccca

SEQ ID NO: 81045 - DNA, 25 bp, Homo sapiens
cactgtctgggacgaaaggtagatc

SEQ ID NO: 81046 - DNA, 25 bp, Homo sapiens
ggcaggtggcagtcatagtatcttt

SEQ ID NO: 81047 - DNA, 25 bp, Homo sapiens
gggagtccttttctaactgagccta

SEQ ID NO: 81048 - DNA, 25 bp, Homo sapiens
cgtgtgctctgaagaatggtgttcc

SEQ ID NO: 81049 - DNA, 25 bp, Homo sapiens
gtgagaaacactgagagacccgtta

SEQ ID NO: 81050 - DNA, 25 bp, Homo sapiens
attacagctgtttgggcatggtggc

SEQ ID NO: 81051 - DNA, 25 bp, Homo sapiens
cctgtatgggtagccatgatattta

SEQ ID NO: 81052 - DNA, 25 bp, Homo sapiens
ctgatgacttcattgtgatagcctc

SEQ ID NO: 81053 - DNA, 25 bp, Homo sapiens
tgttacacaatatgactagggctta

SEQ ID NO: 81054 - DNA, 25 bp, Homo sapiens
ataaaatacttttcctgagtattaa

SEQ ID NO: 81055 - DNA, 25 bp, Homo sapiens
ctttgatggccttttcccaagaata

SEQ ID NO: 81056 - DNA, 25 bp, Homo sapiens
tctctgcaacagataacaatgtgtg

SEQ ID NO: 81057 - DNA, 25 bp, Homo sapiens
caataacagagtataagtttaaaat

SEQ ID NO: 81058 - DNA, 25 bp, Homo sapiens
cctgtctggacattcagttattgcc

SEQ ID NO: 81059 - DNA, 25 bp, Homo sapiens
ttcccatgccaagatgccaaaagta

SEQ ID NO: 81060 - DNA, 25 bp, Homo sapiens
agcctcttgttagggatgatgccca

SEQ ID NO: 81061 - DNA, 25 bp, Homo sapiens
gcacaaaggtcttttgttaatgtga

SEQ ID NO: 81062 - DNA, 25 bp, Homo sapiens
ggtgaacattttccagactgctact

SEQ ID NO: 81063 - DNA, 25 bp, Homo sapiens
agaggtggcctcagtctattaatta

SEQ ID NO: 81064 - DNA, 25 bp, Homo sapiens
ctaaaccttaggctgatgctcagtc

SEQ ID NO: 81065 - DNA, 25 bp, Homo sapiens
tcagtcttctttcttctcatatgga

SEQ ID NO: 81066 - DNA, 25 bp, Homo sapiens
gcagcttacagaggcatccactttt

SEQ ID NO: 81067 - DNA, 25 bp, Homo sapiens
atactccgggtctgtggcattcatc

SEQ ID NO: 81068 - DNA, 25 bp, Homo sapiens
ctggcactgttctcacagggtaata

SEQ ID NO: 81069 - DNA, 25 bp, Homo sapiens
tgaagttctggccatccttatgaga

SEQ ID NO: 81070 - DNA, 25 bp, Homo sapiens
tagggcctcccagtaagattcaaag

SEQ ID NO: 81071 - DNA, 25 bp, Homo sapiens
tcccataaggtgagagcatgtactg

SEQ ID NO: 81072 - DNA, 25 bp, Homo sapiens
ggcagccacagttaccatttacaga

SEQ ID NO: 81073 - DNA, 25 bp, Homo sapiens
aacaaattagttatctgaaaacatc

SEQ ID NO: 81074 - DNA, 25 bp, Homo sapiens
aacaaccccaccaaaaccccttgta

SEQ ID NO: 81075 - DNA, 25 bp, Homo sapiens
ctaaggtagaaaaaaatgggttttc

SEQ ID NO: 81076 - DNA, 25 bp, Homo sapiens
tggctctgccattaactaagtagta

SEQ ID NO: 81077 - DNA, 25 bp, Homo sapiens
aggaattctggcttcagtctataca

SEQ ID NO: 81078 - DNA, 25 bp, Homo sapiens
tggggaacctatgacattttggcta

SEQ ID NO: 81079 - DNA, 25 bp, Homo sapiens
atccagggcccaggaaaaaggttca

SEQ ID NO: 81080 - DNA, 25 bp, Homo sapiens
attttaaaaaagaggtaaggggata

SEQ ID NO: 81081 - DNA, 25 bp, Homo sapiens
gactccgcttcatactttgtgcctg

SEQ ID NO: 81082 - DNA, 25 bp, Homo sapiens
actgactctggtttctcctccttca

SEQ ID NO: 81083 - DNA, 25 bp, Homo sapiens
gtgtttgttccctgctatttttgta

SEQ ID NO: 81084 - DNA, 25 bp, Homo sapiens
gattagtctccatctccaaggttta

SEQ ID NO: 81085 - DNA, 25 bp, Homo sapiens
cttggatgaagccaccattattgca

SEQ ID NO: 81086 - DNA, 25 bp, Homo sapiens
gggctttcacaaggcgacggaactt

SEQ ID NO: 81087 - DNA, 25 bp, Homo sapiens
gttgagttaaaccaatggccagttt

SEQ ID NO: 81088 - DNA, 25 bp, Homo sapiens
agagctagagtttgttcctttttgg

SEQ ID NO: 81089 - DNA, 25 bp, Homo sapiens
actgggaattgactgacttgcttac

SEQ ID NO: 81090 - DNA, 25 bp, Homo sapiens
tggtaagggccacaaaaagaatatg

SEQ ID NO: 81091 - DNA, 25 bp, Homo sapiens
ctcagagcacagaaaatatgggttc

SEQ ID NO: 81092 - DNA, 25 bp, Homo sapiens
tcagggtgactacatattctgtatg

SEQ ID NO: 81093 - DNA, 25 bp, Homo sapiens
cagacttctggctattctttctcga

SEQ ID NO: 81094 - DNA, 25 bp, Homo sapiens
agcaagcctctcttggatttatgga

SEQ ID NO: 81095 - DNA, 25 bp, Homo sapiens
tcaagaacaactgttttgaactgaa

SEQ ID NO: 81096 - DNA, 25 bp, Homo sapiens
gtgatcctcctggaacggttgaaga

SEQ ID NO: 81097 - DNA, 25 bp, Homo sapiens
ggtttatcaagtgaactgctcagca

SEQ ID NO: 81098 - DNA, 25 bp, Homo sapiens
tatttccctccttctccttggcgta

SEQ ID NO: 81099 - DNA, 25 bp, Homo sapiens
tgaaaccttggattgtcagaacatg

SEQ ID NO: 81100 - DNA, 25 bp, Homo sapiens
tgtctgttttcccagcctagattta

SEQ ID NO: 81101 - DNA, 25 bp, Homo sapiens
ggactctctgcctgcctgttgataa

SEQ ID NO: 81102 - DNA, 25 bp, Homo sapiens
tccaagggttataggattcctgaca

SEQ ID NO: 81103 - DNA, 25 bp, Homo sapiens
cttcacccccttcttaacttttgga

SEQ ID NO: 81104 - DNA, 25 bp, Homo sapiens
ctggctgaccattgaaggatttctt

SEQ ID NO: 81105 - DNA, 25 bp, Homo sapiens
tctgtagagaacaaggccttaattc

SEQ ID NO: 81106 - DNA, 25 bp, Homo sapiens
ccaggaaaccctgtgttggggcgta

SEQ ID NO: 81107 - DNA, 25 bp, Homo sapiens
gaggtaagctctgacatctccagta

SEQ ID NO: 81108 - DNA, 25 bp, Homo sapiens
ccttgacctaagtgttggcagtaca

SEQ ID NO: 81109 - DNA, 25 bp, Homo sapiens
tgtttgttagacctgacaccagtta

SEQ ID NO: 81110 - DNA, 25 bp, Homo sapiens
atgcagttttagacaccagggctta

SEQ ID NO: 81111 - DNA, 25 bp, Homo sapiens
tgtcctgagtagaatgacagtcctc

SEQ ID NO: 81112 - DNA, 25 bp, Homo sapiens
ggtggtatgactggcactattttcg

SEQ ID NO: 81113 - DNA, 25 bp, Homo sapiens
tgggtccaagactgctgtagcaata

SEQ ID NO: 81114 - DNA, 25 bp, Homo sapiens
cttcacctgtattttggccctgtca

SEQ ID NO: 81115 - DNA, 25 bp, Homo sapiens
ttcctcatttggcaggcccatctta

SEQ ID NO: 81116 - DNA, 25 bp, Homo sapiens
gagacatctgggtttccatacactg

SEQ ID NO: 81117 - DNA, 25 bp, Homo sapiens
actggctcctcgtactgaacttgta

SEQ ID NO: 81118 - DNA, 25 bp, Homo sapiens
ccctggtgtggcttctaagtggcaa

SEQ ID NO: 81119 - DNA, 25 bp, Homo sapiens
cctcacctattgaaatgataacagt

SEQ ID NO: 81120 - DNA, 25 bp, Homo sapiens
cttgggcctgaaagtcaatatactc

SEQ ID NO: 81121 - DNA, 25 bp, Homo sapiens
ctgattgttcatgcctcactgtatg

SEQ ID NO: 81122 - DNA, 25 bp, Homo sapiens
cttgattgaataattcttaattctt

SEQ ID NO: 81123 - DNA, 25 bp, Homo sapiens
cctggtctcacgcataatactttgg

SEQ ID NO: 81124 - DNA, 25 bp, Homo sapiens
gctcgcttccgcttttcaattttta

SEQ ID NO: 81125 - DNA, 25 bp, Homo sapiens
tgccagttagtcagatgctcaggta

SEQ ID NO: 81126 - DNA, 25 bp, Homo sapiens
tccctggagatggaagagttcagtc

SEQ ID NO: 81127 - DNA, 25 bp, Homo sapiens
caccgctgtggcttcagactagttc

SEQ ID NO: 81128 - DNA, 25 bp, Homo sapiens
cgattctgtcagagtgatgccatta

SEQ ID NO: 81129 - DNA, 25 bp, Homo sapiens
actacttggctgatcgtgctaccta

SEQ ID NO: 81130 - DNA, 25 bp, Homo sapiens
tgggtcacaggttccacaatctgta

SEQ ID NO: 81131 - DNA, 25 bp, Homo sapiens
ccatgggccatttctaagggtctta

SEQ ID NO: 81132 - DNA, 25 bp, Homo sapiens
gctaggctagcacttgtcacaaatt

SEQ ID NO: 81133 - DNA, 25 bp, Homo sapiens
gtttcttcttatgagcccagcccta

SEQ ID NO: 81134 - DNA, 25 bp, Homo sapiens
cctgggcatttttgaggactctttc

SEQ ID NO: 81135 - DNA, 25 bp, Homo sapiens
ccactatgcagtaggagcttttata

SEQ ID NO: 81136 - DNA, 25 bp, Homo sapiens
ccacagggaacctcagtagcagttg

SEQ ID NO: 81137 - DNA, 25 bp, Homo sapiens
gtggtccctccctctacttcaaata

SEQ ID NO: 81138 - DNA, 25 bp, Homo sapiens
agaaaacagagtagagttttttttt

SEQ ID NO: 81139 - DNA, 25 bp, Homo sapiens
gtgatcttctttttcttttagcagg

SEQ ID NO: 81140 - DNA, 25 bp, Homo sapiens
tgccaaactgactaactggggtttc

SEQ ID NO: 81141 - DNA, 25 bp, Homo sapiens
gagggagactccgtatctgaatttc

SEQ ID NO: 81142 - DNA, 25 bp, Homo sapiens
cattaaagcgtttctcagcacagga

SEQ ID NO: 81143 - DNA, 25 bp, Homo sapiens
cccagtggactgagcacatttttca

SEQ ID NO: 81144 - DNA, 25 bp, Homo sapiens
ggccaattatggacacagatctaca

SEQ ID NO: 81145 - DNA, 25 bp, Homo sapiens
aagacaaattattaacccagtatga

SEQ ID NO: 81146 - DNA, 25 bp, Homo sapiens
ctctgtctcaaaagtcttataaaga

SEQ ID NO: 81147 - DNA, 25 bp, Homo sapiens
accacatttctagcccaatttgtca

SEQ ID NO: 81148 - DNA, 25 bp, Homo sapiens
cctgggtctattccaagctagtaga

SEQ ID NO: 81149 - DNA, 25 bp, Homo sapiens
ttgggatccctgaaaggcagtgtta

SEQ ID NO: 81150 - DNA, 25 bp, Homo sapiens
tgtctgcctgcctccaagtaatacc

SEQ ID NO: 81151 - DNA, 25 bp, Homo sapiens
tggcacttgggtctggggcatgctt

SEQ ID NO: 81152 - DNA, 25 bp, Homo sapiens
tttgtggccaagtaaacggttcttc

SEQ ID NO: 81153 - DNA, 25 bp, Homo sapiens
tcaattttagtaacatttttatctt

SEQ ID NO: 81154 - DNA, 25 bp, Homo sapiens
ggcagggctttctcacatttctttc

SEQ ID NO: 81155 - DNA, 25 bp, Homo sapiens
cctcctaaaggatgcaggttccctg

SEQ ID NO: 81156 - DNA, 25 bp, Homo sapiens
ctgtctttattaggtttttagcttc

SEQ ID NO: 81157 - DNA, 25 bp, Homo sapiens
ttccaggtccaaatctcagagagag

SEQ ID NO: 81158 - DNA, 25 bp, Homo sapiens
actaataaccatattttaagctata

SEQ ID NO: 81159 - DNA, 25 bp, Homo sapiens
ccaaatgtccattttcctctgtata

SEQ ID NO: 81160 - DNA, 25 bp, Homo sapiens
tcctgtgaagggggaacagacaaat

SEQ ID NO: 81161 - DNA, 25 bp, Homo sapiens
cttggcgctatgttggaaacctagg

SEQ ID NO: 81162 - DNA, 25 bp, Homo sapiens
atttatttttgaaacatgcttaaaa

SEQ ID NO: 81163 - DNA, 25 bp, Homo sapiens
cctagtggcacatgaaacaaaatat

SEQ ID NO: 81164 - DNA, 25 bp, Homo sapiens
cctactggcttgaggagattttcta

SEQ ID NO: 81165 - DNA, 25 bp, Homo sapiens
ggaagccaagtaccagccactttta

SEQ ID NO: 81166 - DNA, 25 bp, Homo sapiens
cttgctgaaggccatgtggaaaatg

SEQ ID NO: 81167 - DNA, 25 bp, Homo sapiens
acagatgatttggtaccttgagagg

SEQ ID NO: 81168 - DNA, 25 bp, Homo sapiens
gccactgagttattgagttacgaaa

SEQ ID NO: 81169 - DNA, 25 bp, Homo sapiens
aatgtcatatatggttatggcatat

SEQ ID NO: 81170 - DNA, 25 bp, Homo sapiens
taaataagcgtaactaccaagagaa

SEQ ID NO: 81171 - DNA, 25 bp, Homo sapiens
tatataatgtgtttaatataatgtg

SEQ ID NO: 81172 - DNA, 25 bp, Homo sapiens
tttatttaaataatgccaaaagaag

SEQ ID NO: 81173 - DNA, 25 bp, Homo sapiens
acctctgggaatttttaatatgcta

SEQ ID NO: 81174 - DNA, 25 bp, Homo sapiens
caagagaattcaaagcaaattttac

SEQ ID NO: 81175 - DNA, 25 bp, Homo sapiens
tatatatttcacaagactaagtaat

SEQ ID NO: 81176 - DNA, 25 bp, Homo sapiens
cccatgtggggaaatattgtgtata

SEQ ID NO: 81177 - DNA, 25 bp, Homo sapiens
cagccctaagggatcattaccgtca

SEQ ID NO: 81178 - DNA, 25 bp, Homo sapiens
agaacctagtcagtgcatgcattta

SEQ ID NO: 81179 - DNA, 25 bp, Homo sapiens
ctgaggcttcttttagagtcaaata

SEQ ID NO: 81180 - DNA, 25 bp, Homo sapiens
ccctggagtttctcctggtagctta

SEQ ID NO: 81181 - DNA, 25 bp, Homo sapiens
ctatcgctattatacttatgaatgg

SEQ ID NO: 81182 - DNA, 25 bp, Homo sapiens
atttctaagttgtgtttggccagca

SEQ ID NO: 81183 - DNA, 25 bp, Homo sapiens
tccaagatattctttatatattcag

SEQ ID NO: 81184 - DNA, 25 bp, Homo sapiens
atgatcaaaagaaaattgaagagta

SEQ ID NO: 81185 - DNA, 25 bp, Homo sapiens
tgcatcaacgcagcctttcaaattg

SEQ ID NO: 81186 - DNA, 25 bp, Homo sapiens
atgaaaaacttcatatatatgtttt

SEQ ID NO: 81187 - DNA, 25 bp, Homo sapiens
agaatgccattcttcccagccagga

SEQ ID NO: 81188 - DNA, 25 bp, Homo sapiens
tttcgctgaaaagatagttgactgc

SEQ ID NO: 81189 - DNA, 25 bp, Homo sapiens
ggaggtttgagctctgaatccttta

SEQ ID NO: 81190 - DNA, 25 bp, Homo sapiens
gggccctttcaacttgcatcctgta

SEQ ID NO: 81191 - DNA, 25 bp, Homo sapiens
ggcttgtggtctcctgtaaatgtta

SEQ ID NO: 81192 - DNA, 25 bp, Homo sapiens
tcacaaagtgggctgacctggtata

SEQ ID NO: 81193 - DNA, 25 bp, Homo sapiens
ccttgatccttctctgctctcttga

SEQ ID NO: 81194 - DNA, 25 bp, Homo sapiens
ccgatggagtccaatgttcaataaa

SEQ ID NO: 81195 - DNA, 25 bp, Homo sapiens
ggatttgatccctgctgaagcttta

SEQ ID NO: 81196 - DNA, 25 bp, Homo sapiens
gagccttgggcattcctccatagta

SEQ ID NO: 81197 - DNA, 25 bp, Homo sapiens
ggtattttttgcaccagcccaagtg

SEQ ID NO: 81198 - DNA, 25 bp, Homo sapiens
acatcatttgctcttaaagtgttgc

SEQ ID NO: 81199 - DNA, 25 bp, Homo sapiens
agtgggaatcgagtaatatgaccgt

SEQ ID NO: 81200 - DNA, 25 bp, Homo sapiens
tgactgtcctgtctcttacacctga

SEQ ID NO: 81201 - DNA, 25 bp, Homo sapiens
ggctctgcttacaagaaatattttg

SEQ ID NO: 81202 - DNA, 25 bp, Homo sapiens
gaagctcttcttcaggaactacctg

SEQ ID NO: 81203 - DNA, 25 bp, Homo sapiens
tgcttgcctcaagaaaacccaggga

SEQ ID NO: 81204 - DNA, 25 bp, Homo sapiens
ttgctctgcgctacctgggatattg

SEQ ID NO: 81205 - DNA, 25 bp, Homo sapiens
gtttggatatttgttaccacccata

SEQ ID NO: 81206 - DNA, 25 bp, Homo sapiens
gattgtcagggaatacttctttgat

SEQ ID NO: 81207 - DNA, 25 bp, Homo sapiens
taaagaggtaggtttgcgccaaatc

SEQ ID NO: 81208 - DNA, 25 bp, Homo sapiens
ttgactgttaggagagccaaggaca

SEQ ID NO: 81209 - DNA, 25 bp, Homo sapiens
tatttttaaatggcagtaagaaatg

SEQ ID NO: 81210 - DNA, 25 bp, Homo sapiens
cgtctgaagttccttacccaaaata

SEQ ID NO: 81211 - DNA, 25 bp, Homo sapiens
ctccacggccagaacaattgtcatt

SEQ ID NO: 81212 - DNA, 25 bp, Homo sapiens
gctatgacggtggactatcccttta

SEQ ID NO: 81213 - DNA, 25 bp, Homo sapiens
tcccgagaacctagagtgtgattta

SEQ ID NO: 81214 - DNA, 25 bp, Homo sapiens
gactgacctgccaatttaagacctg

SEQ ID NO: 81215 - DNA, 25 bp, Homo sapiens
cccaaagctctatgatttcctatta

SEQ ID NO: 81216 - DNA, 25 bp, Homo sapiens
tgtagccaacaagaagtgagccata

SEQ ID NO: 81217 - DNA, 25 bp, Homo sapiens
tctctaagaggtgacagctgaattc

SEQ ID NO: 81218 - DNA, 25 bp, Homo sapiens
aggtccttttggctacagttgagtc

SEQ ID NO: 81219 - DNA, 25 bp, Homo sapiens
ttccggggtaacagtatgtggcttg

SEQ ID NO: 81220 - DNA, 25 bp, Homo sapiens
acaagcttttggtgggctcagtatc

SEQ ID NO: 81221 - DNA, 25 bp, Homo sapiens
cactgggactgtttagatcttctta

SEQ ID NO: 81222 - DNA, 25 bp, Homo sapiens
gctgttggagttaaataccttgata

SEQ ID NO: 81223 - DNA, 25 bp, Homo sapiens
ctgaggacagctgggttttataaac

SEQ ID NO: 81224 - DNA, 25 bp, Homo sapiens
catctgtcataactagctttgggca

SEQ ID NO: 81225 - DNA, 25 bp, Homo sapiens
gacttgctctctttctgtgtaatta

SEQ ID NO: 81226 - DNA, 25 bp, Homo sapiens
cccagaaggttcacagcaagacaaa

SEQ ID NO: 81227 - DNA, 25 bp, Homo sapiens
gagaggttgcctatttttccacgaa

SEQ ID NO: 81228 - DNA, 25 bp, Homo sapiens
tgtttcctcccaagtgtttgccata

SEQ ID NO: 81229 - DNA, 25 bp, Homo sapiens
ggggagaaatcccaccatgtatttt

SEQ ID NO: 81230 - DNA, 25 bp, Homo sapiens
ctcaagtgggtccaggtgtatctca

SEQ ID NO: 81231 - DNA, 25 bp, Homo sapiens
gctaaatttgcctagatgcagtatc

SEQ ID NO: 81232 - DNA, 25 bp, Homo sapiens
gggtgcctctatcatctaagtgcta

SEQ ID NO: 81233 - DNA, 25 bp, Homo sapiens
aggcagctcacccatctgacactgg

SEQ ID NO: 81234 - DNA, 25 bp, Homo sapiens
aaataaacaaactccctcccaccgt

SEQ ID NO: 81235 - DNA, 25 bp, Homo sapiens
ttatactctactgttttatattttt

SEQ ID NO: 81236 - DNA, 25 bp, Homo sapiens
gtccggcttttgtgagtgaccaaca

SEQ ID NO: 81237 - DNA, 25 bp, Homo sapiens
ggagccttttcccatcattctattg

SEQ ID NO: 81238 - DNA, 25 bp, Homo sapiens
gatccagttaggtgtgcatcattta

SEQ ID NO: 81239 - DNA, 25 bp, Homo sapiens
ttgaggtgtccttcaccctgtcctc

SEQ ID NO: 81240 - DNA, 25 bp, Homo sapiens
ctggctctctgcttgctctttgata

SEQ ID NO: 81241 - DNA, 25 bp, Homo sapiens
agctgaaagttaccatggacagttg

SEQ ID NO: 81242 - DNA, 25 bp, Homo sapiens
cctgttggggcatgtaagctaagtc

SEQ ID NO: 81243 - DNA, 25 bp, Homo sapiens
ttggccattctcaaagggtaaaaca

SEQ ID NO: 81244 - DNA, 25 bp, Homo sapiens
tgaaacgcttagagatccatatttg

SEQ ID NO: 81245 - DNA, 25 bp, Homo sapiens
ctgggtttttaggtacatggcagca

SEQ ID NO: 81246 - DNA, 25 bp, Homo sapiens
ctcagcttttactatgaggaacttc

SEQ ID NO: 81247 - DNA, 25 bp, Homo sapiens
ctgctgatcccgttgtgtactgaaa

SEQ ID NO: 81248 - DNA, 25 bp, Homo sapiens
cacttatgtgtgagaatggccttca

SEQ ID NO: 81249 - DNA, 25 bp, Homo sapiens
tttctggcttctggagtggcatata

SEQ ID NO: 81250 - DNA, 25 bp, Homo sapiens
ttccatagatgctacaggacacata

SEQ ID NO: 81251 - DNA, 25 bp, Homo sapiens
ccttgtagcaggcctaggaaactag

SEQ ID NO: 81252 - DNA, 25 bp, Homo sapiens
ctgcaaggttccagggtcacaactg

SEQ ID NO: 81253 - DNA, 25 bp, Homo sapiens
ttacagccactcttgaaagtcaagg

SEQ ID NO: 81254 - DNA, 25 bp, Homo sapiens
aggttacagtaaatgaattatatac

SEQ ID NO: 81255 - DNA, 25 bp, Homo sapiens
tacttgaagttttggtactgtagtt

SEQ ID NO: 81256 - DNA, 25 bp, Homo sapiens
ggaaatgtgaaaggaaagtatcttg

SEQ ID NO: 81257 - DNA, 25 bp, Homo sapiens
tttagattgacttttagccaccata

SEQ ID NO: 81258 - DNA, 25 bp, Homo sapiens
cgttcttaacgcaacaaagtaatta

SEQ ID NO: 81259 - DNA, 25 bp, Homo sapiens
tatctgcaggctttcacaacttttg

SEQ ID NO: 81260 - DNA, 25 bp, Homo sapiens
cactttgtgaatgaacttacctata

SEQ ID NO: 81261 - DNA, 25 bp, Homo sapiens
cattttcaaatggatggtaacaata

SEQ ID NO: 81262 - DNA, 25 bp, Homo sapiens
ataataagaagtacttaggaatttg

SEQ ID NO: 81263 - DNA, 25 bp, Homo sapiens
tctgccctttgatgcccaatattta

SEQ ID NO: 81264 - DNA, 25 bp, Homo sapiens
aactgccgtatgtgctgtaatgaac

SEQ ID NO: 81265 - DNA, 25 bp, Homo sapiens
tgagggtctagtaacacatcctgtt

SEQ ID NO: 81266 - DNA, 25 bp, Homo sapiens
gcccagggacctgtgtgccaaacaa

SEQ ID NO: 81267 - DNA, 25 bp, Homo sapiens
cttttatactggtgaatatatgtga

SEQ ID NO: 81268 - DNA, 25 bp, Homo sapiens
tttaagttgtagaggagctgtcata

SEQ ID NO: 81269 - DNA, 25 bp, Homo sapiens
ggctattttaccagtttttacaatt

SEQ ID NO: 81270 - DNA, 25 bp, Homo sapiens
gggttaatttttttcctattcagaa

SEQ ID NO: 81271 - DNA, 25 bp, Homo sapiens
attcaccaagtgtgtgcatttggtg

SEQ ID NO: 81272 - DNA, 25 bp, Homo sapiens
ttaacctatgcctaagttatagtta

SEQ ID NO: 81273 - DNA, 25 bp, Homo sapiens
gccggtactcaaaacttagcatgtt

SEQ ID NO: 81274 - DNA, 25 bp, Homo sapiens
cttagcactctgttcagcctgaatc

SEQ ID NO: 81275 - DNA, 25 bp, Homo sapiens
ggcaactggcagacttcttctagaa

SEQ ID NO: 81276 - DNA, 25 bp, Homo sapiens
tgggccgtagtatttcgtcacattc

SEQ ID NO: 81277 - DNA, 25 bp, Homo sapiens
ctactgtgggaagctactaatctga

SEQ ID NO: 81278 - DNA, 25 bp, Homo sapiens
gggcctggcacataagttctaaata

SEQ ID NO: 81279 - DNA, 25 bp, Homo sapiens
cctttgttcatgtggaaactccatc

SEQ ID NO: 81280 - DNA, 25 bp, Homo sapiens
ttctcattcctcagtttccatgtac

SEQ ID NO: 81281 - DNA, 25 bp, Homo sapiens
gtggcctcccttgctgtaacattta

SEQ ID NO: 81282 - DNA, 25 bp, Homo sapiens
accttttatggccatgtttgaatca

SEQ ID NO: 81283 - DNA, 25 bp, Homo sapiens
ctgagccagtcccaagtattatttt

SEQ ID NO: 81284 - DNA, 25 bp, Homo sapiens
cttggaggcctccagacttagagta

SEQ ID NO: 81285 - DNA, 25 bp, Homo sapiens
cttcacgtgcaccatgggaatttta

SEQ ID NO: 81286 - DNA, 25 bp, Homo sapiens
tcaacctggaagttttctgctaacc

SEQ ID NO: 81287 - DNA, 25 bp, Homo sapiens
tttagtgaccaccaagcagcaagtg

SEQ ID NO: 81288 - DNA, 25 bp, Homo sapiens
tgcattttatgagtgacggtggacc

SEQ ID NO: 81289 - DNA, 25 bp, Homo sapiens
tgagccttcacttttcagaaatttg

SEQ ID NO: 81290 - DNA, 25 bp, Homo sapiens
ctcgtgtccgtgaagctaaaggatc

SEQ ID NO: 81291 - DNA, 25 bp, Homo sapiens
ctcttcaagctgtgcagggatattg

SEQ ID NO: 81292 - DNA, 25 bp, Homo sapiens
cgttttttaaaaagacacataaaga

SEQ ID NO: 81293 - DNA, 25 bp, Homo sapiens
cgcaaccctgatttggcaagtacta

SEQ ID NO: 81294 - DNA, 25 bp, Homo sapiens
cctcagacttaaacaatgattgtgc

SEQ ID NO: 81295 - DNA, 25 bp, Homo sapiens
atggcttcacccactttcagaggta

SEQ ID NO: 81296 - DNA, 25 bp, Homo sapiens
cctcctggggtagtctaaagccatg

SEQ ID NO: 81297 - DNA, 25 bp, Homo sapiens
tgttacaaagcttacataccaggtg

SEQ ID NO: 81298 - DNA, 25 bp, Homo sapiens
ttccttgttattttatcctagcttg

SEQ ID NO: 81299 - DNA, 25 bp, Homo sapiens
ggaatgcatgacttctctactgacc

SEQ ID NO: 81300 - DNA, 25 bp, Homo sapiens
tctcatatgagtatcccagtgtgta

SEQ ID NO: 81301 - DNA, 25 bp, Homo sapiens
ggtactgaggagtgggatattgtga

SEQ ID NO: 81302 - DNA, 25 bp, Homo sapiens
ctttattgctactgcactgaagtct

SEQ ID NO: 81303 - DNA, 25 bp, Homo sapiens
gccatgttgaactggaacctcccaa

SEQ ID NO: 81304 - DNA, 25 bp, Homo sapiens
aaactttggaaatgtgtctgctgta

SEQ ID NO: 81305 - DNA, 25 bp, Homo sapiens
agtctgaaattccacggtaagtctc

SEQ ID NO: 81306 - DNA, 25 bp, Homo sapiens
ccacaatggcaggtttcagggagta

SEQ ID NO: 81307 - DNA, 25 bp, Homo sapiens
tttttaaaaaaaggaaaattcagaa

SEQ ID NO: 81308 - DNA, 25 bp, Homo sapiens
tttctactttactgacatacatctg

SEQ ID NO: 81309 - DNA, 25 bp, Homo sapiens
tggaggaatttactttaggcccaac

SEQ ID NO: 81310 - DNA, 25 bp, Homo sapiens
tcctccacgatgaatatgaaaaaca

SEQ ID NO: 81311 - DNA, 25 bp, Homo sapiens
ttgcaagtggtgaagtactcaaata

SEQ ID NO: 81312 - DNA, 25 bp, Homo sapiens
aaggttaaaagaaaaagagtgcctt

SEQ ID NO: 81313 - DNA, 25 bp, Homo sapiens
gaacttgctgcacacatgtcatttg

SEQ ID NO: 81314 - DNA, 25 bp, Homo sapiens
tggttgcctgcagttctcataaaaa

SEQ ID NO: 81315 - DNA, 25 bp, Homo sapiens
ctcaggtgtgatacttttgcccaac

SEQ ID NO: 81316 - DNA, 25 bp, Homo sapiens
ctgctgaggcctcattaattgagca

SEQ ID NO: 81317 - DNA, 25 bp, Homo sapiens
ccaggccaagtattagggatgatcc

SEQ ID NO: 81318 - DNA, 25 bp, Homo sapiens
gctgctgcccaatttcaggacttta

SEQ ID NO: 81319 - DNA, 25 bp, Homo sapiens
agctgctggcgtaagtgtctacaaa

SEQ ID NO: 81320 - DNA, 25 bp, Homo sapiens
caacttggcagctgtcttagaaacc

SEQ ID NO: 81321 - DNA, 25 bp, Homo sapiens
cttttattttaaccttaaatcgtaa

SEQ ID NO: 81322 - DNA, 25 bp, Homo sapiens
gtggagaaatacatcagaccttatc

SEQ ID NO: 81323 - DNA, 25 bp, Homo sapiens
tggggtgccttgaagtcatgctttc

SEQ ID NO: 81324 - DNA, 25 bp, Homo sapiens
gaggcattactttcggatgtccaga

SEQ ID NO: 81325 - DNA, 25 bp, Homo sapiens
ctgtcagcaagtgttccctaaaatc

SEQ ID NO: 81326 - DNA, 25 bp, Homo sapiens
agtgggcccttcttggaaaatcttc

SEQ ID NO: 81327 - DNA, 25 bp, Homo sapiens
gcacacacacacacaaaaatgtttg

SEQ ID NO: 81328 - DNA, 25 bp, Homo sapiens
gggaacaacagacactacaatatgg

SEQ ID NO: 81329 - DNA, 25 bp, Homo sapiens
tctctgggacacactgctgagtttc

SEQ ID NO: 81330 - DNA, 25 bp, Homo sapiens
ttggtcccacttctcagggttactc

SEQ ID NO: 81331 - DNA, 25 bp, Homo sapiens
tctcagtttacacaccaagggcttg

SEQ ID NO: 81332 - DNA, 25 bp, Homo sapiens
acgtggctggctgatgtttacataa

SEQ ID NO: 81333 - DNA, 25 bp, Homo sapiens
ccctgttaaggagttgtttattgta

SEQ ID NO: 81334 - DNA, 25 bp, Homo sapiens
cttttccttgctggaggccctgtta

SEQ ID NO: 81335 - DNA, 25 bp, Homo sapiens
gtccctttgaaagtaatcctgcata

SEQ ID NO: 81336 - DNA, 25 bp, Homo sapiens
ccaaggtcggtttctttggcatgta

SEQ ID NO: 81337 - DNA, 25 bp, Homo sapiens
gggcctacagtgagagaacctattg

SEQ ID NO: 81338 - DNA, 25 bp, Homo sapiens
agcctcttagaactaccgggttgta

SEQ ID NO: 81339 - DNA, 25 bp, Homo sapiens
tttcagctatgtgatgccaaatgcc

SEQ ID NO: 81340 - DNA, 25 bp, Homo sapiens
tcagtgcacagaagagcaaacagtt

SEQ ID NO: 81341 - DNA, 25 bp, Homo sapiens
agataaaaataataaagtgctaagt

SEQ ID NO: 81342 - DNA, 25 bp, Homo sapiens
ctcccaaagtggtggagttcctttc

SEQ ID NO: 81343 - DNA, 25 bp, Homo sapiens
tatcctttagtccaagccaaactga

SEQ ID NO: 81344 - DNA, 25 bp, Homo sapiens
tcatctagagttgtgtctattgttc

SEQ ID NO: 81345 - DNA, 25 bp, Homo sapiens
tcacgctaaaatctcttataataac

SEQ ID NO: 81346 - DNA, 25 bp, Homo sapiens
agccactttctagtttagtacttta

SEQ ID NO: 81347 - DNA, 25 bp, Homo sapiens
ccagaacaggtagctcttgattttc

SEQ ID NO: 81348 - DNA, 25 bp, Homo sapiens
gagtgccttgtgcaatgcattcaca

SEQ ID NO: 81349 - DNA, 25 bp, Homo sapiens
aatgcagtgattcagaatgtaaaag

SEQ ID NO: 81350 - DNA, 25 bp, Homo sapiens
actattacaaaagagggttcatgca

SEQ ID NO: 81351 - DNA, 25 bp, Homo sapiens
aaaaaaaaagatttctctgaaaggt

SEQ ID NO: 81352 - DNA, 25 bp, Homo sapiens
atacttttcagtttacactagctaa

SEQ ID NO: 81353 - DNA, 25 bp, Homo sapiens
tcagctgggctcaaggtttagctta

SEQ ID NO: 81354 - DNA, 25 bp, Homo sapiens
atagcagtgatgcatagtaaattag

SEQ ID NO: 81355 - DNA, 25 bp, Homo sapiens
atgtaccaggcatctccaaagtttc

SEQ ID NO: 81356 - DNA, 25 bp, Homo sapiens
tactcctgtctgaaacctttattgc

SEQ ID NO: 81357 - DNA, 25 bp, Homo sapiens
gtggctaccactgtcatctttctca

SEQ ID NO: 81358 - DNA, 25 bp, Homo sapiens
tggcacgtggagcttactatttcta

SEQ ID NO: 81359 - DNA, 25 bp, Homo sapiens
ctgggtgaaagatgtacacttctta

SEQ ID NO: 81360 - DNA, 25 bp, Homo sapiens
tcctctttcctatcctcagaatatg

SEQ ID NO: 81361 - DNA, 25 bp, Homo sapiens
ggagctattctttgtgtaccatgac

SEQ ID NO: 81362 - DNA, 25 bp, Homo sapiens
gcttcacatttcttgaccgacacta

SEQ ID NO: 81363 - DNA, 25 bp, Homo sapiens
ttggcaaaagctatgtgaggtacta

SEQ ID NO: 81364 - DNA, 25 bp, Homo sapiens
tgtccaggacgtgtgtaaaagtttc

SEQ ID NO: 81365 - DNA, 25 bp, Homo sapiens
ccacagagatcttatcccgatcaga

SEQ ID NO: 81366 - DNA, 25 bp, Homo sapiens
ccttagtgtgattctggtggaaatg

SEQ ID NO: 81367 - DNA, 25 bp, Homo sapiens
gtttcttattaggattcattgaaac

SEQ ID NO: 81368 - DNA, 25 bp, Homo sapiens
caaggacttttcttgattgaacaaa

SEQ ID NO: 81369 - DNA, 25 bp, Homo sapiens
gccaccattctggaggagttgctta

SEQ ID NO: 81370 - DNA, 25 bp, Homo sapiens
ggaactgctaatctttatcaatgtt

SEQ ID NO: 81371 - DNA, 25 bp, Homo sapiens
acgttaaatgttatttaataggctg

SEQ ID NO: 81372 - DNA, 25 bp, Homo sapiens
ggtacttaattttccctcaggtata

SEQ ID NO: 81373 - DNA, 25 bp, Homo sapiens
cgcctacatcgtttgaatctctata

SEQ ID NO: 81374 - DNA, 25 bp, Homo sapiens
ctgagatagtctcccttgcagtaga

SEQ ID NO: 81375 - DNA, 25 bp, Homo sapiens
cagcattgtttcctgaagattagta

SEQ ID NO: 81376 - DNA, 25 bp, Homo sapiens
acgtaggaaggtatggtgtaacaca

SEQ ID NO: 81377 - DNA, 25 bp, Homo sapiens
gaaggccttgattgctgatagtcta

SEQ ID NO: 81378 - DNA, 25 bp, Homo sapiens
gtttgcctgaaaccatatctagcct

SEQ ID NO: 81379 - DNA, 25 bp, Homo sapiens
aggtggcacttctgccttaaatatc

SEQ ID NO: 81380 - DNA, 25 bp, Homo sapiens
tgccatcaagcaacctgtgagagtt

SEQ ID NO: 81381 - DNA, 25 bp, Homo sapiens
tttcactagttaaggtatggattgg

SEQ ID NO: 81382 - DNA, 25 bp, Homo sapiens
ttttatttattttttctcttcttga

SEQ ID NO: 81383 - DNA, 25 bp, Homo sapiens
acattttgaaaatttgctaggtgag

SEQ ID NO: 81384 - DNA, 25 bp, Homo sapiens
cctctcaaggggactttatgtttta

SEQ ID NO: 81385 - DNA, 25 bp, Homo sapiens
gttgggcaactcagtgactttcttc

SEQ ID NO: 81386 - DNA, 25 bp, Homo sapiens
ccctgtcagtagattggtaacaaca

SEQ ID NO: 81387 - DNA, 25 bp, Homo sapiens
gcaggaaagatgtacaccacagtta

SEQ ID NO: 81388 - DNA, 25 bp, Homo sapiens
cactcctccatgtgcataacatact

SEQ ID NO: 81389 - DNA, 25 bp, Homo sapiens
attggctgctgggatcttgataatc

SEQ ID NO: 81390 - DNA, 25 bp, Homo sapiens
tgactctggctagtggctgaaattt

SEQ ID NO: 81391 - DNA, 25 bp, Homo sapiens
caagccctggtcaattgtgtatatg

SEQ ID NO: 81392 - DNA, 25 bp, Homo sapiens
gttggactgctatctgactttgaca

SEQ ID NO: 81393 - DNA, 25 bp, Homo sapiens
gctctcccatggtaggtaaattgtc

SEQ ID NO: 81394 - DNA, 25 bp, Homo sapiens
ttctggggaacgaaaagtcttcacc

SEQ ID NO: 81395 - DNA, 25 bp, Homo sapiens
aactgctttactgctctccaggata

SEQ ID NO: 81396 - DNA, 25 bp, Homo sapiens
gctcagcttgagttagtttaccata

SEQ ID NO: 81397 - DNA, 25 bp, Homo sapiens
gtataaatcctgatcacccaaatat

SEQ ID NO: 81398 - DNA, 25 bp, Homo sapiens
caaggaatagaattttaatgctttt

SEQ ID NO: 81399 - DNA, 25 bp, Homo sapiens
tgtacttttaaagacgatactgctt

SEQ ID NO: 81400 - DNA, 25 bp, Homo sapiens
catttttgtacaaattttggaaccc

SEQ ID NO: 81401 - DNA, 25 bp, Homo sapiens
ttaaagatgttcatatttatttttc

SEQ ID NO: 81402 - DNA, 25 bp, Homo sapiens
accagtgttttgaggtcagttacta

SEQ ID NO: 81403 - DNA, 25 bp, Homo sapiens
tgttgccgaaagtaagggtgacctc

SEQ ID NO: 81404 - DNA, 25 bp, Homo sapiens
ttggcttgtctatatggcaccctga

SEQ ID NO: 81405 - DNA, 25 bp, Homo sapiens
tttcggcacctcaaatgactgtata

SEQ ID NO: 81406 - DNA, 25 bp, Homo sapiens
acatttattattttacactttagaa

SEQ ID NO: 81407 - DNA, 25 bp, Homo sapiens
gcaaaatctgtgtttccttcataaa

SEQ ID NO: 81408 - DNA, 25 bp, Homo sapiens
aatgagataaatattttaaagtttg

SEQ ID NO: 81409 - DNA, 25 bp, Homo sapiens
atcttacatcaaggggcagtggctc

SEQ ID NO: 81410 - DNA, 25 bp, Homo sapiens
ccaagtgcctcaaaattcatgtatc

SEQ ID NO: 81411 - DNA, 25 bp, Homo sapiens
tcccgacaatatttgggtcacaatg

SEQ ID NO: 81412 - DNA, 25 bp, Homo sapiens
ccatcgttttttgcagaaggcctta

SEQ ID NO: 81413 - DNA, 25 bp, Homo sapiens
atagaggccctatttctgttgaagc

SEQ ID NO: 81414 - DNA, 25 bp, Homo sapiens
cttaaacacattcttttaaagggca

SEQ ID NO: 81415 - DNA, 25 bp, Homo sapiens
agtaagtgaactgctcagaatatga

SEQ ID NO: 81416 - DNA, 25 bp, Homo sapiens
ccacacgtcttgttcacaggatgca

SEQ ID NO: 81417 - DNA, 25 bp, Homo sapiens
tttcccgcctctgagtgttagtttc

SEQ ID NO: 81418 - DNA, 25 bp, Homo sapiens
tgccttcctgtaaaagtcaaacttg

SEQ ID NO: 81419 - DNA, 25 bp, Homo sapiens
tgggctaggccttctagaaagtaca

SEQ ID NO: 81420 - DNA, 25 bp, Homo sapiens
agtgactctggcttttccctttcta

SEQ ID NO: 81421 - DNA, 25 bp, Homo sapiens
tccttggggatagcttgaactttac

SEQ ID NO: 81422 - DNA, 25 bp, Homo sapiens
caagaaaccttctgtccatggctta

SEQ ID NO: 81423 - DNA, 25 bp, Homo sapiens
ttaaaaaaatcttcacaaagacttc

SEQ ID NO: 81424 - DNA, 25 bp, Homo sapiens
ccttcactggcttatgcttatatta

SEQ ID NO: 81425 - DNA, 25 bp, Homo sapiens
aaatcaattacttaaagtatacttg

SEQ ID NO: 81426 - DNA, 25 bp, Homo sapiens
tctcctcaggtgaattctaatctca

SEQ ID NO: 81427 - DNA, 25 bp, Homo sapiens
tcactgcgagaactggtaattaaca

SEQ ID NO: 81428 - DNA, 25 bp, Homo sapiens
cctctggggtcacattgagcatttc

SEQ ID NO: 81429 - DNA, 25 bp, Homo sapiens
aacacaattcctcggatatagtagc

SEQ ID NO: 81430 - DNA, 25 bp, Homo sapiens
ggcccttatatgcttgctgaattta

SEQ ID NO: 81431 - DNA, 25 bp, Homo sapiens
ggccctattaatggcagatgcacta

SEQ ID NO: 81432 - DNA, 25 bp, Homo sapiens
ggatactaacccttcatgtggccta

SEQ ID NO: 81433 - DNA, 25 bp, Homo sapiens
ctgcgagtggtcctgagttcatttt

SEQ ID NO: 81434 - DNA, 25 bp, Homo sapiens
cctggtgacataaattaggagcttt

SEQ ID NO: 81435 - DNA, 25 bp, Homo sapiens
atcagtgaagggtgaatttattttt

SEQ ID NO: 81436 - DNA, 25 bp, Homo sapiens
tgtgtgcaccaaggaacagaatatc

SEQ ID NO: 81437 - DNA, 25 bp, Homo sapiens
cagatggttttcactggtatgactc

SEQ ID NO: 81438 - DNA, 25 bp, Homo sapiens
ctccctcattttggggcagccatgc

SEQ ID NO: 81439 - DNA, 25 bp, Homo sapiens
agatttagttagaagaccctcagtc

SEQ ID NO: 81440 - DNA, 25 bp, Homo sapiens
ggcccaagcctttcaatagatattg

SEQ ID NO: 81441 - DNA, 25 bp, Homo sapiens
tttccctggagagatatcctcactc

SEQ ID NO: 81442 - DNA, 25 bp, Homo sapiens
taattgatttaactactcacatatt

SEQ ID NO: 81443 - DNA, 25 bp, Homo sapiens
cattttatatattggagttcaaagt

SEQ ID NO: 81444 - DNA, 25 bp, Homo sapiens
ccctgcgggtagaaaacagacatct

SEQ ID NO: 81445 - DNA, 25 bp, Homo sapiens
ccctgaagctggtagagagaaacac

SEQ ID NO: 81446 - DNA, 25 bp, Homo sapiens
cctgctagagctgactctgatatta

SEQ ID NO: 81447 - DNA, 25 bp, Homo sapiens
tctccaggaaagtagctcaaaggtt

SEQ ID NO: 81448 - DNA, 25 bp, Homo sapiens
taggggccctgagattaaacactta

SEQ ID NO: 81449 - DNA, 25 bp, Homo sapiens
gtgggcatcgcttaaatgtttctta

SEQ ID NO: 81450 - DNA, 25 bp, Homo sapiens
cgccagtgtacgtgcaaaataaagt

SEQ ID NO: 81451 - DNA, 25 bp, Homo sapiens
ccacgaggaagatgacttcattctt

SEQ ID NO: 81452 - DNA, 25 bp, Homo sapiens
ggctgctctcagatcaagttcatga

SEQ ID NO: 81453 - DNA, 25 bp, Homo sapiens
aaaaaaaatgattttgtgtgtatgc

SEQ ID NO: 81454 - DNA, 25 bp, Homo sapiens
agtcagctcttaccatctagtcttg

SEQ ID NO: 81455 - DNA, 25 bp, Homo sapiens
ggtttacgtctctccttctactggt

SEQ ID NO: 81456 - DNA, 25 bp, Homo sapiens
ccaaaagttgttccctggatcctca

SEQ ID NO: 81457 - DNA, 25 bp, Homo sapiens
agtaccttttctccagtctgcatgc

SEQ ID NO: 81458 - DNA, 25 bp, Homo sapiens
agaaaaagaaaggctcttgtctgct

SEQ ID NO: 81459 - DNA, 25 bp, Homo sapiens
gtgcctcatctccatgggctatgtg

SEQ ID NO: 81460 - DNA, 25 bp, Homo sapiens
tgatcccacatttactgagcttcta

SEQ ID NO: 81461 - DNA, 25 bp, Homo sapiens
ccttccactgcgcttttctatagta

SEQ ID NO: 81462 - DNA, 25 bp, Homo sapiens
tcctgaggcagtgtttaataatcta

SEQ ID NO: 81463 - DNA, 25 bp, Homo sapiens
cgtgatgacttttgcttcaggacta

SEQ ID NO: 81464 - DNA, 25 bp, Homo sapiens
cactgggtgggccatttaacaaaca

SEQ ID NO: 81465 - DNA, 25 bp, Homo sapiens
ttccaaaaaagaaaagtgtttctgt

SEQ ID NO: 81466 - DNA, 25 bp, Homo sapiens
tcaggacttggcacatcagggcatc

SEQ ID NO: 81467 - DNA, 25 bp, Homo sapiens
gccagttaattgaaggctctgaata

SEQ ID NO: 81468 - DNA, 25 bp, Homo sapiens
atcctcgatgtctcccatgggaaga

SEQ ID NO: 81469 - DNA, 25 bp, Homo sapiens
agaagccaggaaaaacatgaccata

SEQ ID NO: 81470 - DNA, 25 bp, Homo sapiens
agggtcagctgttttcacttagggc

SEQ ID NO: 81471 - DNA, 25 bp, Homo sapiens
ttattttaagagaggaataaaacac

SEQ ID NO: 81472 - DNA, 25 bp, Homo sapiens
cccatgtcatgagttatgctttgtc

SEQ ID NO: 81473 - DNA, 25 bp, Homo sapiens
ctggaaacttccctgaacctgctga

SEQ ID NO: 81474 - DNA, 25 bp, Homo sapiens
agctagggtccatgtgatattttac

SEQ ID NO: 81475 - DNA, 25 bp, Homo sapiens
tatgaaaacaactgccttaagataa

SEQ ID NO: 81476 - DNA, 25 bp, Homo sapiens
taatactgcactgaaccctgggccc

SEQ ID NO: 81477 - DNA, 25 bp, Homo sapiens
gaccgggacctgcaattcgcttcta

SEQ ID NO: 81478 - DNA, 25 bp, Homo sapiens
tatgttaagggtagaaggtatccaa

SEQ ID NO: 81479 - DNA, 25 bp, Homo sapiens
ccacttaattccaaaggtgtatttg

SEQ ID NO: 81480 - DNA, 25 bp, Homo sapiens
ttcctgagcagactctaacttagtc

SEQ ID NO: 81481 - DNA, 25 bp, Homo sapiens
gaagtactgaaaagaccctgcaatg

SEQ ID NO: 81482 - DNA, 25 bp, Homo sapiens
tcaggcctggtagaatgagaaactt

SEQ ID NO: 81483 - DNA, 25 bp, Homo sapiens
tacaactaaagcaacctaataaaca

SEQ ID NO: 81484 - DNA, 25 bp, Homo sapiens
gggctggggagaatgggtggggagt

SEQ ID NO: 81485 - DNA, 25 bp, Homo sapiens
tgtggacactattctgcctactgca

SEQ ID NO: 81486 - DNA, 25 bp, Homo sapiens
tgtggagcagcaattatccaaagcc

SEQ ID NO: 81487 - DNA, 25 bp, Homo sapiens
gaggaccatctctcacaatctgtgg

SEQ ID NO: 81488 - DNA, 25 bp, Homo sapiens
gtgactgtcactaagcctccaaatg

SEQ ID NO: 81489 - DNA, 25 bp, Homo sapiens
tctagagtcgagcaaacttcttttg

SEQ ID NO: 81490 - DNA, 25 bp, Homo sapiens
ttgatccctggtaaagacattctgg

SEQ ID NO: 81491 - DNA, 25 bp, Homo sapiens
cactttggctatggctaaggtttta

SEQ ID NO: 81492 - DNA, 25 bp, Homo sapiens
agctgccagcttctcgacttatcaa

SEQ ID NO: 81493 - DNA, 25 bp, Homo sapiens
cgtaataattagatgataaacagta

SEQ ID NO: 81494 - DNA, 25 bp, Homo sapiens
gcaagtgctagtaagtatttagagc

SEQ ID NO: 81495 - DNA, 25 bp, Homo sapiens
gagtaaagaacttggtcttttaacc

SEQ ID NO: 81496 - DNA, 25 bp, Homo sapiens
agcctcaattctgagttggaactta

SEQ ID NO: 81497 - DNA, 25 bp, Homo sapiens
gcttatggagatgtatttcacacag

SEQ ID NO: 81498 - DNA, 25 bp, Homo sapiens
ctctggggtttaagacatctatcta

SEQ ID NO: 81499 - DNA, 25 bp, Homo sapiens
aacactgctacattttcccaaataa

SEQ ID NO: 81500 - DNA, 25 bp, Homo sapiens
ctcttctgttggttgagcaagcttc

SEQ ID NO: 81501 - DNA, 25 bp, Homo sapiens
gtgtgctttccaattttttccaggg

SEQ ID NO: 81502 - DNA, 25 bp, Homo sapiens
gaagggtgtttgcaaccagatacta

SEQ ID NO: 81503 - DNA, 25 bp, Homo sapiens
attctcccaacatgtgctcagtagc

SEQ ID NO: 81504 - DNA, 25 bp, Homo sapiens
tgccagttgcccttcacagtcctta

SEQ ID NO: 81505 - DNA, 25 bp, Homo sapiens
ctgggctcctaatgcacagggtgga

SEQ ID NO: 81506 - DNA, 25 bp, Homo sapiens
aaattgggctaaattatgtaggagt

SEQ ID NO: 81507 - DNA, 25 bp, Homo sapiens
cgctgctgcagctgaatagaatatc

SEQ ID NO: 81508 - DNA, 25 bp, Homo sapiens
gcaaggagagttcaaatttccctga

SEQ ID NO: 81509 - DNA, 25 bp, Homo sapiens
cgtgataaggtatgcatattttccc

SEQ ID NO: 81510 - DNA, 25 bp, Homo sapiens
tggccatagtaccttttctaagaga

SEQ ID NO: 81511 - DNA, 25 bp, Homo sapiens
caggggtgatttctaggttgcttta

SEQ ID NO: 81512 - DNA, 25 bp, Homo sapiens
aggaattactgaaccacagcctttg

SEQ ID NO: 81513 - DNA, 25 bp, Homo sapiens
cccttttagatacgtggcatgacag

SEQ ID NO: 81514 - DNA, 25 bp, Homo sapiens
gccctctgaagcctatgatctagtg

SEQ ID NO: 81515 - DNA, 25 bp, Homo sapiens
atcaggtgttgtcagagagccctta

SEQ ID NO: 81516 - DNA, 25 bp, Homo sapiens
ttaaattcagtttattatgtatata

SEQ ID NO: 81517 - DNA, 25 bp, Homo sapiens
tttatcatgcttctcactgcccacg

SEQ ID NO: 81518 - DNA, 25 bp, Homo sapiens
gtgaatctctggttctcatgcctta

SEQ ID NO: 81519 - DNA, 25 bp, Homo sapiens
gtcgatccaggcctatatagccatt

SEQ ID NO: 81520 - DNA, 25 bp, Homo sapiens
tatccagggctctcgtcaaaatgca

SEQ ID NO: 81521 - DNA, 25 bp, Homo sapiens
cccaggggtaaaaggcagcgttata

SEQ ID NO: 81522 - DNA, 25 bp, Homo sapiens
gcctgagtgggattttcttccatga

SEQ ID NO: 81523 - DNA, 25 bp, Homo sapiens
gggactttcacctttgctcatttca

SEQ ID NO: 81524 - DNA, 25 bp, Homo sapiens
ttagcaggatttaaattactgaagt

SEQ ID NO: 81525 - DNA, 25 bp, Homo sapiens
cccagggaagcgtcatagtgttgta

SEQ ID NO: 81526 - DNA, 25 bp, Homo sapiens
gtgagttgtcccacccaagaagata

SEQ ID NO: 81527 - DNA, 25 bp, Homo sapiens
ctctgcacagtcactttgaagtgga

SEQ ID NO: 81528 - DNA, 25 bp, Homo sapiens
ttagcctatcagacacaattgtatg

SEQ ID NO: 81529 - DNA, 25 bp, Homo sapiens
ggatttgccatcttctacttcaagg

SEQ ID NO: 81530 - DNA, 25 bp, Homo sapiens
ctcacaggtagaacggcatgatatc

SEQ ID NO: 81531 - DNA, 25 bp, Homo sapiens
agctgtacatgagaccctactctta

SEQ ID NO: 81532 - DNA, 25 bp, Homo sapiens
atgcttagctggacaaattgcctga

SEQ ID NO: 81533 - DNA, 25 bp, Homo sapiens
tgaaaggttccttgctagtactagc

SEQ ID NO: 81534 - DNA, 25 bp, Homo sapiens
aaggcccttcccagctctgtcagta

SEQ ID NO: 81535 - DNA, 25 bp, Homo sapiens
ggcctacatttgacagcgagtgttc

SEQ ID NO: 81536 - DNA, 25 bp, Homo sapiens
ggcaccagccagtcgctacatttta

SEQ ID NO: 81537 - DNA, 25 bp, Homo sapiens
gagggctgtcaactgcatgcatgta

SEQ ID NO: 81538 - DNA, 25 bp, Homo sapiens
gcggctagaaaatggcctccctaca

SEQ ID NO: 81539 - DNA, 25 bp, Homo sapiens
gacatgccatatggttgaatgctag

SEQ ID NO: 81540 - DNA, 25 bp, Homo sapiens
ctggggaaatcctatactgcagttt

SEQ ID NO: 81541 - DNA, 25 bp, Homo sapiens
gcttgtgttcaatgctgctctatta

SEQ ID NO: 81542 - DNA, 25 bp, Homo sapiens
ttcaccagggaaattaacagcactc

SEQ ID NO: 81543 - DNA, 25 bp, Homo sapiens
cagagatgatggtgagcaaaataac

SEQ ID NO: 81544 - DNA, 25 bp, Homo sapiens
gtgcctaggccttttcactattatg

SEQ ID NO: 81545 - DNA, 25 bp, Homo sapiens
tgtaccattcagcatcctaaggatg

SEQ ID NO: 81546 - DNA, 25 bp, Homo sapiens
cctgggcagctgtttttgcttgaca

SEQ ID NO: 81547 - DNA, 25 bp, Homo sapiens
aactgacttcgatatattttttaaa

SEQ ID NO: 81548 - DNA, 25 bp, Homo sapiens
tttgggcgtctttaatgatactatc

SEQ ID NO: 81549 - DNA, 25 bp, Homo sapiens
gaaatgtactcttccgtctgtcaca

SEQ ID NO: 81550 - DNA, 25 bp, Homo sapiens
tctgggcccatttcagctactattc

SEQ ID NO: 81551 - DNA, 25 bp, Homo sapiens
ctcaggcttgtactctttagattca

SEQ ID NO: 81552 - DNA, 25 bp, Homo sapiens
accctgctgggcaagctacaaaata

SEQ ID NO: 81553 - DNA, 25 bp, Homo sapiens
gccagccctttgtgaaccctcgttt

SEQ ID NO: 81554 - DNA, 25 bp, Homo sapiens
ttacccgtaggtggatcttgaaata

SEQ ID NO: 81555 - DNA, 25 bp, Homo sapiens
gcagagcctttttcagtctgagaga

SEQ ID NO: 81556 - DNA, 25 bp, Homo sapiens
tggaggatccagaaaacttccgtga

SEQ ID NO: 81557 - DNA, 25 bp, Homo sapiens
cccagtgcctatggtatctctgcta

SEQ ID NO: 81558 - DNA, 25 bp, Homo sapiens
aaaaaacactgtagttgttcttatg

SEQ ID NO: 81559 - DNA, 25 bp, Homo sapiens
ccaattgtgggttttgcctccttta

SEQ ID NO: 81560 - DNA, 25 bp, Homo sapiens
tgtccacctgtgcttctttcctgta

SEQ ID NO: 81561 - DNA, 25 bp, Homo sapiens
cctgctttctgtggagaagagccta

SEQ ID NO: 81562 - DNA, 25 bp, Homo sapiens
ggctcccagagttgtacccttcatt

SEQ ID NO: 81563 - DNA, 25 bp, Homo sapiens
ccttggcaggagctgtcagaactca

SEQ ID NO: 81564 - DNA, 25 bp, Homo sapiens
aggacatcagtacctgagaggttaa

SEQ ID NO: 81565 - DNA, 25 bp, Homo sapiens
ttgccaatcctgtggtttccttgta

SEQ ID NO: 81566 - DNA, 25 bp, Homo sapiens
tgagaccaaagccatactgactaaa

SEQ ID NO: 81567 - DNA, 25 bp, Homo sapiens
tataatcatatggcctttttaaatg

SEQ ID NO: 81568 - DNA, 25 bp, Homo sapiens
ggtgggcaacatttagcttttcata

SEQ ID NO: 81569 - DNA, 25 bp, Homo sapiens
ttccaatggcctgaaagattcctgc

SEQ ID NO: 81570 - DNA, 25 bp, Homo sapiens
tttggcagtgccacagaactatgca

SEQ ID NO: 81571 - DNA, 25 bp, Homo sapiens
acactgccctagctgttgttctaga

SEQ ID NO: 81572 - DNA, 25 bp, Homo sapiens
gcccacctcagtgcaatcataaaga

SEQ ID NO: 81573 - DNA, 25 bp, Homo sapiens
ttgctcccaggaaagcaatgcctta

SEQ ID NO: 81574 - DNA, 25 bp, Homo sapiens
ggttcattctgaagacaatcggatt

SEQ ID NO: 81575 - DNA, 25 bp, Homo sapiens
ttaattcttcagtgaagtccagaat

SEQ ID NO: 81576 - DNA, 25 bp, Homo sapiens
tgtgcatgttgctcccttacgtata

SEQ ID NO: 81577 - DNA, 25 bp, Homo sapiens
gagtcattataaagataaattaatc

SEQ ID NO: 81578 - DNA, 25 bp, Homo sapiens
ttcatgttttaatgaatttatttac

SEQ ID NO: 81579 - DNA, 25 bp, Homo sapiens
ggcttgcaccttgctcatgcctcat

SEQ ID NO: 81580 - DNA, 25 bp, Homo sapiens
ggtctgtttagaaaaaatgttatga

SEQ ID NO: 81581 - DNA, 25 bp, Homo sapiens
ccctgaatgttttagctgccaccta

SEQ ID NO: 81582 - DNA, 25 bp, Homo sapiens
gtctctgagcatgtaagttgacatc

SEQ ID NO: 81583 - DNA, 25 bp, Homo sapiens
tggcactttataagggacatggtta

SEQ ID NO: 81584 - DNA, 25 bp, Homo sapiens
ctctggaaataggtttattgagaga

SEQ ID NO: 81585 - DNA, 25 bp, Homo sapiens
tgtgcatgatgagctttgaacccga

SEQ ID NO: 81586 - DNA, 25 bp, Homo sapiens
tcatgtgtggcaatcagatctcttc

SEQ ID NO: 81587 - DNA, 25 bp, Homo sapiens
acacacaaaataaatcatagaaata

SEQ ID NO: 81588 - DNA, 25 bp, Homo sapiens
ctagcccagtggtgcaagttcaact

SEQ ID NO: 81589 - DNA, 25 bp, Homo sapiens
gctctgatgttaacgtcctcttttg

SEQ ID NO: 81590 - DNA, 25 bp, Homo sapiens
tcagcctcggtcaagcagtagaaaa

SEQ ID NO: 81591 - DNA, 25 bp, Homo sapiens
tcatttctctggtgtggcagcaagc

SEQ ID NO: 81592 - DNA, 25 bp, Homo sapiens
ttgcagttttccacaagcccttttg

SEQ ID NO: 81593 - DNA, 25 bp, Homo sapiens
ctttggtttgcgagattctttcaga

SEQ ID NO: 81594 - DNA, 25 bp, Homo sapiens
tgtgtatttgaaggttgatgaggct

SEQ ID NO: 81595 - DNA, 25 bp, Homo sapiens
ccagcttccatgagacttgttttta

SEQ ID NO: 81596 - DNA, 25 bp, Homo sapiens
tagtcattccactaacagtttgatc

SEQ ID NO: 81597 - DNA, 25 bp, Homo sapiens
aggcttggtccactctacttattca

SEQ ID NO: 81598 - DNA, 25 bp, Homo sapiens
gcttgagcaaaaagcagtcatccta

SEQ ID NO: 81599 - DNA, 25 bp, Homo sapiens
tttcccctttctcctgttttgaaat

SEQ ID NO: 81600 - DNA, 25 bp, Homo sapiens
aggcagctcacttgctcctggtgta

SEQ ID NO: 81601 - DNA, 25 bp, Homo sapiens
tcctgggcataaaagaacctggctg

SEQ ID NO: 81602 - DNA, 25 bp, Homo sapiens
aggcaagggtcatgtccatatattc

SEQ ID NO: 81603 - DNA, 25 bp, Homo sapiens
cgtgagctgctgtcattggattctc

SEQ ID NO: 81604 - DNA, 25 bp, Homo sapiens
gctgaacctgatcttccaagtgaca

SEQ ID NO: 81605 - DNA, 25 bp, Homo sapiens
tccgctggttcttcttggtgaatta

SEQ ID NO: 81606 - DNA, 25 bp, Homo sapiens
ccgctacttgggtcactgtcttatt

SEQ ID NO: 81607 - DNA, 25 bp, Homo sapiens
tccctgagcccatgtaatatacctg

SEQ ID NO: 81608 - DNA, 25 bp, Homo sapiens
ttctaggttctcgttcatgggcatg

SEQ ID NO: 81609 - DNA, 25 bp, Homo sapiens
gggtggcttccctggatattaatta

SEQ ID NO: 81610 - DNA, 25 bp, Homo sapiens
tgttcccagacataggctaaaagta

SEQ ID NO: 81611 - DNA, 25 bp, Homo sapiens
tcagatctgtctggcaacagaatcc

SEQ ID NO: 81612 - DNA, 25 bp, Homo sapiens
aggtgcctgccttgagaaaattagc

SEQ ID NO: 81613 - DNA, 25 bp, Homo sapiens
tctggccctgaagctactgctagca

SEQ ID NO: 81614 - DNA, 25 bp, Homo sapiens
ccaccacgtgatgctgaaggttata

SEQ ID NO: 81615 - DNA, 25 bp, Homo sapiens
aggacatcctatctctggcctcatg

SEQ ID NO: 81616 - DNA, 25 bp, Homo sapiens
agtggggaagacaaatgtggtcctc

SEQ ID NO: 81617 - DNA, 25 bp, Homo sapiens
gggccaggctctcctagattattta

SEQ ID NO: 81618 - DNA, 25 bp, Homo sapiens
tggaacattattgcgctctgaggta

SEQ ID NO: 81619 - DNA, 25 bp, Homo sapiens
cctgtcagtgtagatggaagccctc

SEQ ID NO: 81620 - DNA, 25 bp, Homo sapiens
tctgtccagaaaaaccgattgcctt

SEQ ID NO: 81621 - DNA, 25 bp, Homo sapiens
ttggggccaaaagcttctcctgatc

SEQ ID NO: 81622 - DNA, 25 bp, Homo sapiens
tctcaaggctgtgggtcctactttc

SEQ ID NO: 81623 - DNA, 25 bp, Homo sapiens
tcaagctctgatgtggtatagcctc

SEQ ID NO: 81624 - DNA, 25 bp, Homo sapiens
tgagcttccacatctgcaaatcggg

SEQ ID NO: 81625 - DNA, 25 bp, Homo sapiens
aacgtggatttacaactgaagcatg

SEQ ID NO: 81626 - DNA, 25 bp, Homo sapiens
tttactgggataatgacatatagtg

SEQ ID NO: 81627 - DNA, 25 bp, Homo sapiens
tcagcaaaacttaactgttgagttt

SEQ ID NO: 81628 - DNA, 25 bp, Homo sapiens
cctgccctccaaacatgttcgatta

SEQ ID NO: 81629 - DNA, 25 bp, Homo sapiens
ctgcaccagtctagatcaccgtatg

SEQ ID NO: 81630 - DNA, 25 bp, Homo sapiens
tgacatgtataaagcacgaggaatt

SEQ ID NO: 81631 - DNA, 25 bp, Homo sapiens
taaccttagtgagaaaagacgagca

SEQ ID NO: 81632 - DNA, 25 bp, Homo sapiens
ctgcctaacaggataccttcttata

SEQ ID NO: 81633 - DNA, 25 bp, Homo sapiens
tgtcataatgcaaaaaatcaccaga

SEQ ID NO: 81634 - DNA, 25 bp, Homo sapiens
accccaagggatgtggggggtgtgg

SEQ ID NO: 81635 - DNA, 25 bp, Homo sapiens
gaaagacaaagtaaatatacctaat

SEQ ID NO: 81636 - DNA, 25 bp, Homo sapiens
tcagcttggacctctgtgttacaga

SEQ ID NO: 81637 - DNA, 25 bp, Homo sapiens
ccgggaattttcttcggtgagcatt

SEQ ID NO: 81638 - DNA, 25 bp, Homo sapiens
gcgcccggccctgctattatttatt

SEQ ID NO: 81639 - DNA, 25 bp, Homo sapiens
tcccttagtccgaagatagttctgc

SEQ ID NO: 81640 - DNA, 25 bp, Homo sapiens
tgccctctggagttatagcctgctg

SEQ ID NO: 81641 - DNA, 25 bp, Homo sapiens
agctgggttctcttgccttctgaaa

SEQ ID NO: 81642 - DNA, 25 bp, Homo sapiens
gtattagccatccagacttgtgatc

SEQ ID NO: 81643 - DNA, 25 bp, Homo sapiens
gctcagatttgctcattaccgggtc

SEQ ID NO: 81644 - DNA, 25 bp, Homo sapiens
ctgcaggccagtgagttttataaac

SEQ ID NO: 81645 - DNA, 25 bp, Homo sapiens
ggtgccatgtggaatctacctatgt

SEQ ID NO: 81646 - DNA, 25 bp, Homo sapiens
ctgctgcttgaaaaaactcccgtgg

SEQ ID NO: 81647 - DNA, 25 bp, Homo sapiens
tcaggggccagtctcttatctaatg

SEQ ID NO: 81648 - DNA, 25 bp, Homo sapiens
ggacagttcacctgctcacattttg

SEQ ID NO: 81649 - DNA, 25 bp, Homo sapiens
cagcattggaatttgggatggtacc

SEQ ID NO: 81650 - DNA, 25 bp, Homo sapiens
ggctccctgggtgacacttcatgca

SEQ ID NO: 81651 - DNA, 25 bp, Homo sapiens
ccttccttccagttgtgtgtcagta

SEQ ID NO: 81652 - DNA, 25 bp, Homo sapiens
ccactcactgggatttgttactttc

SEQ ID NO: 81653 - DNA, 25 bp, Homo sapiens
gcctctacgtgtcatggggatcatg

SEQ ID NO: 81654 - DNA, 25 bp, Homo sapiens
aggtgacctctgtttctgggacgaa

SEQ ID NO: 81655 - DNA, 25 bp, Homo sapiens
ggagagagatgaggggtcaggagtc

SEQ ID NO: 81656 - DNA, 25 bp, Homo sapiens
gagggccttttatagtcaccacatg

SEQ ID NO: 81657 - DNA, 25 bp, Homo sapiens
cccatctgtttgcttcgggctgaca

SEQ ID NO: 81658 - DNA, 25 bp, Homo sapiens
aggattcagcgggtcctcgagctta

SEQ ID NO: 81659 - DNA, 25 bp, Homo sapiens
ggggccctggccatacataaacaga

SEQ ID NO: 81660 - DNA, 25 bp, Homo sapiens
aacctggttggttacgtctgtcgta

SEQ ID NO: 81661 - DNA, 25 bp, Homo sapiens
tccaacgttagtcgcatggtttctc

SEQ ID NO: 81662 - DNA, 25 bp, Homo sapiens
agatggtttctttactgggatactc

SEQ ID NO: 81663 - DNA, 25 bp, Homo sapiens
gccttgtataagacaatccaacaac

SEQ ID NO: 81664 - DNA, 25 bp, Homo sapiens
gggccatctctctcttggtcccaga

SEQ ID NO: 81665 - DNA, 25 bp, Homo sapiens
caggggcaaaaggggacacacagaa

SEQ ID NO: 81666 - DNA, 25 bp, Homo sapiens
gcccgtgtttgtccatatagcattc

SEQ ID NO: 81667 - DNA, 25 bp, Homo sapiens
gtggcctgaaacctgtcctctgaga

SEQ ID NO: 81668 - DNA, 25 bp, Homo sapiens
ggcctggttctctcccaaggatctg

SEQ ID NO: 81669 - DNA, 25 bp, Homo sapiens
tgcccgaagccaggagcactttaaa

SEQ ID NO: 81670 - DNA, 25 bp, Homo sapiens
aggattcctagtacaacgcagcttg

SEQ ID NO: 81671 - DNA, 25 bp, Homo sapiens
caaagttgggtcagaggttggcatg

SEQ ID NO: 81672 - DNA, 25 bp, Homo sapiens
gaccgggaaacctcatcacacattg

SEQ ID NO: 81673 - DNA, 25 bp, Homo sapiens
cggcaccgtccagagcgatttagtt

SEQ ID NO: 81674 - DNA, 25 bp, Homo sapiens
tgtggacactccctaagcctactga

SEQ ID NO: 81675 - DNA, 25 bp, Homo sapiens
aggccctggtgaacctgcttcagca

SEQ ID NO: 81676 - DNA, 25 bp, Homo sapiens
ggctccgggcttcagtactgatcaa

SEQ ID NO: 81677 - DNA, 25 bp, Homo sapiens
aaagcctttattgcctgagccagtg

SEQ ID NO: 81678 - DNA, 25 bp, Homo sapiens
cctgcgtcagttttatacaatcatc

SEQ ID NO: 81679 - DNA, 25 bp, Homo sapiens
tccttaaaggggacgctggctcgtc

SEQ ID NO: 81680 - DNA, 25 bp, Homo sapiens
ccattcaactttcatactttggcga

SEQ ID NO: 81681 - DNA, 25 bp, Homo sapiens
ggcaaccctttctgtcagatatccc

SEQ ID NO: 81682 - DNA, 25 bp, Homo sapiens
ctacactggggtgggattcttatcc

SEQ ID NO: 81683 - DNA, 25 bp, Homo sapiens
ctcacgacaagaatgcaaacacaaa

SEQ ID NO: 81684 - DNA, 25 bp, Homo sapiens
ctggcaagttcatgcagcaccaatg

SEQ ID NO: 81685 - DNA, 25 bp, Homo sapiens
gtcccagtcatcttccacgcttgtg

SEQ ID NO: 81686 - DNA, 25 bp, Homo sapiens
tctttgggtccaaatttgtgtattg

SEQ ID NO: 81687 - DNA, 25 bp, Homo sapiens
accgcatccgtttcgtaagtcattg

SEQ ID NO: 81688 - DNA, 25 bp, Homo sapiens
ttcccggggttactatgtttgtttc

SEQ ID NO: 81689 - DNA, 25 bp, Homo sapiens
gtgccacctggactctaccaatgtt

SEQ ID NO: 81690 - DNA, 25 bp, Homo sapiens
tgctgcttgaagaaactcccgtggc

SEQ ID NO: 81691 - DNA, 25 bp, Homo sapiens
catgtgcctgaaagtgaaaaagccc

SEQ ID NO: 81692 - DNA, 25 bp, Homo sapiens
ggactggtcacctgctcacattctg

SEQ ID NO: 81693 - DNA, 25 bp, Homo sapiens
ggcgcccttggtgacacttcatcca

SEQ ID NO: 81694 - DNA, 25 bp, Homo sapiens
acgaggcccagttacagtatatata

SEQ ID NO: 81695 - DNA, 25 bp, Homo sapiens
ccagagcttccctgagtagtgcaga

SEQ ID NO: 81696 - DNA, 25 bp, Homo sapiens
gcccaatgtgtgatcaggtttcctg

SEQ ID NO: 81697 - DNA, 25 bp, Homo sapiens
gtgacctccatttctgggaccaaga

SEQ ID NO: 81698 - DNA, 25 bp, Homo sapiens
gtctacccagcgtgagctggcaaac

SEQ ID NO: 81699 - DNA, 25 bp, Homo sapiens
ggatcctcgctcaacatggtgtgtc

SEQ ID NO: 81700 - DNA, 25 bp, Homo sapiens
ccactcggggctttgtgacaagtta

SEQ ID NO: 81701 - DNA, 25 bp, Homo sapiens
agcggggagcacaactgaacaaaca

SEQ ID NO: 81702 - DNA, 25 bp, Homo sapiens
tgcgggcatgtgcacactttccaaa

SEQ ID NO: 81703 - DNA, 25 bp, Homo sapiens
ggtggcctgaaacctgtcctctcta

SEQ ID NO: 81704 - DNA, 25 bp, Homo sapiens
cctggttctcactcacggatctgta

SEQ ID NO: 81705 - DNA, 25 bp, Homo sapiens
cccgtcaggactcagagcagaatta

SEQ ID NO: 81706 - DNA, 25 bp, Homo sapiens
ggaatgcagagctcgccctagttga

SEQ ID NO: 81707 - DNA, 25 bp, Homo sapiens
ttcgtgggattgcagtttgccaaca

SEQ ID NO: 81708 - DNA, 25 bp, Homo sapiens
agaaagttgggtcagaggttggcat

SEQ ID NO: 81709 - DNA, 25 bp, Homo sapiens
gaccgggagacctgatcacactttg

SEQ ID NO: 81710 - DNA, 25 bp, Homo sapiens
ctccttgtgcagtaagtacagcttc

SEQ ID NO: 81711 - DNA, 25 bp, Homo sapiens
tggctgcaccactgtacactagggc

SEQ ID NO: 81712 - DNA, 25 bp, Homo sapiens
cccgaagatatctccgccgctgttg

SEQ ID NO: 81713 - DNA, 25 bp, Homo sapiens
gttcggctcctgtcctcagttatga

SEQ ID NO: 81714 - DNA, 25 bp, Homo sapiens
tggaacaagcagacctcatacaatc

SEQ ID NO: 81715 - DNA, 25 bp, Homo sapiens
gggctttttcactttcaaccacatg

SEQ ID NO: 81716 - DNA, 25 bp, Homo sapiens
accacgggagttttttcaagcagca

SEQ ID NO: 81717 - DNA, 25 bp, Homo sapiens
cagagatctcagtgttgtttccaca

SEQ ID NO: 81718 - DNA, 25 bp, Homo sapiens
tttaaaaagactccaaaggcaagac

SEQ ID NO: 81719 - DNA, 25 bp, Homo sapiens
ctctggcctgtttttctgtcattac

SEQ ID NO: 81720 - DNA, 25 bp, Homo sapiens
ccaattgtgctctctgaaggatttc

SEQ ID NO: 81721 - DNA, 25 bp, Homo sapiens
aaggccctgtttgctctggtttccc

SEQ ID NO: 81722 - DNA, 25 bp, Homo sapiens
gcttctcatggccaaactaggacta

SEQ ID NO: 81723 - DNA, 25 bp, Homo sapiens
tgacttactttactacccgttgggc

SEQ ID NO: 81724 - DNA, 25 bp, Homo sapiens
taggtcattttccttcttgtcaata

SEQ ID NO: 81725 - DNA, 25 bp, Homo sapiens
tcctgacacctagagaacccaaatg

SEQ ID NO: 81726 - DNA, 25 bp, Homo sapiens
cttttacctccttaggaaccggcaa

SEQ ID NO: 81727 - DNA, 25 bp, Homo sapiens
cagtggcctcttctcttgtagtttg

SEQ ID NO: 81728 - DNA, 25 bp, Homo sapiens
cagcagcctgggataagttaaatta

SEQ ID NO: 81729 - DNA, 25 bp, Homo sapiens
ccctggggagttccattaaggataa

SEQ ID NO: 81730 - DNA, 25 bp, Homo sapiens
ttgtggggcccatgaaagctattta

SEQ ID NO: 81731 - DNA, 25 bp, Homo sapiens
cttctctatggaaacttgagcagtg

SEQ ID NO: 81732 - DNA, 25 bp, Homo sapiens
cattatcatgatccagttgtataaa

SEQ ID NO: 81733 - DNA, 25 bp, Homo sapiens
gttgctttcccagagttgacacaga

SEQ ID NO: 81734 - DNA, 25 bp, Homo sapiens
gtggtcctagcaagccagccatttt

SEQ ID NO: 81735 - DNA, 25 bp, Homo sapiens
gttgcacctattctggccctaaatg

SEQ ID NO: 81736 - DNA, 25 bp, Homo sapiens
tcgtgatcagagcattacccaattg

SEQ ID NO: 81737 - DNA, 25 bp, Homo sapiens
ctgtgatctgttaagggacccattc

SEQ ID NO: 81738 - DNA, 25 bp, Homo sapiens
tgctctctggggaatcttgaccttg

SEQ ID NO: 81739 - DNA, 25 bp, Homo sapiens
tgggcctctcccaaaatgatttaga

SEQ ID NO: 81740 - DNA, 25 bp, Homo sapiens
cctgctttgaaaaacgtgattgttc

SEQ ID NO: 81741 - DNA, 25 bp, Homo sapiens
actacctggtgtctgggaaatttca

SEQ ID NO: 81742 - DNA, 25 bp, Homo sapiens
gattgacaggcttagagacactttc

SEQ ID NO: 81743 - DNA, 25 bp, Homo sapiens
tcctgccaggttttgctgaaatatc

SEQ ID NO: 81744 - DNA, 25 bp, Homo sapiens
tggcaccctctcagatcattgattt

SEQ ID NO: 81745 - DNA, 25 bp, Homo sapiens
gccttagtgataaaatgcgagttta

SEQ ID NO: 81746 - DNA, 25 bp, Homo sapiens
tcctcaagttgagcaggtagttctt

SEQ ID NO: 81747 - DNA, 25 bp, Homo sapiens
tgtgcctggatggtttcccactcta

SEQ ID NO: 81748 - DNA, 25 bp, Homo sapiens
tgcatctgatgtgtgtgtgtgcaca

SEQ ID NO: 81749 - DNA, 25 bp, Homo sapiens
ctactgtctacaggagccagatatc

SEQ ID NO: 81750 - DNA, 25 bp, Homo sapiens
cctgctctagcttaggggtttcata

SEQ ID NO: 81751 - DNA, 25 bp, Homo sapiens
tgccctgccaagtaagccaagttag

SEQ ID NO: 81752 - DNA, 25 bp, Homo sapiens
agctgcctgcctatgcttggtcaga

SEQ ID NO: 81753 - DNA, 25 bp, Homo sapiens
ggctccatcatgctagtggcctata

SEQ ID NO: 81754 - DNA, 25 bp, Homo sapiens
ccgtcattgaatgcgactccagctt

SEQ ID NO: 81755 - DNA, 25 bp, Homo sapiens
tcatggggcccaaacagcaactaga

SEQ ID NO: 81756 - DNA, 25 bp, Homo sapiens
tgacagtttgacacagcatggcttc

SEQ ID NO: 81757 - DNA, 25 bp, Homo sapiens
ggtttttccaccattaggcacatgc

SEQ ID NO: 81758 - DNA, 25 bp, Homo sapiens
tgggccttctctattttctcacaga

SEQ ID NO: 81759 - DNA, 25 bp, Homo sapiens
cccattggtggatctagctacttac

SEQ ID NO: 81760 - DNA, 25 bp, Homo sapiens
ttccaattaaggctggggccctgta

SEQ ID NO: 81761 - DNA, 25 bp, Homo sapiens
gggccttgccttcttattcctgttg

SEQ ID NO: 81762 - DNA, 25 bp, Homo sapiens
aatttacttctaaaattaagacccg

SEQ ID NO: 81763 - DNA, 25 bp, Homo sapiens
ggtcaccagatgcacatgttctttg

SEQ ID NO: 81764 - DNA, 25 bp, Homo sapiens
ggcagcctggatttacatgaattta

SEQ ID NO: 81765 - DNA, 25 bp, Homo sapiens
ggcacgcaatctgtcacggatctta

SEQ ID NO: 81766 - DNA, 25 bp, Homo sapiens
ggtgtctactctacaggcacattta

SEQ ID NO: 81767 - DNA, 25 bp, Homo sapiens
cactgaatgtgctctatggcccata

SEQ ID NO: 81768 - DNA, 25 bp, Homo sapiens
cccgcaaatttgacgtgtgtgtgtt

SEQ ID NO: 81769 - DNA, 25 bp, Homo sapiens
gccctttagcctgtgtcccattttg

SEQ ID NO: 81770 - DNA, 25 bp, Homo sapiens
cctggctgagctggaccattattgt

SEQ ID NO: 81771 - DNA, 25 bp, Homo sapiens
cctggctgtggtataagctctgcta

SEQ ID NO: 81772 - DNA, 25 bp, Homo sapiens
ctcaggatctggctaactacaaagc

SEQ ID NO: 81773 - DNA, 25 bp, Homo sapiens
gggcacggaggaaaagcttcatcta

SEQ ID NO: 81774 - DNA, 25 bp, Homo sapiens
ggagggaccctctcttcacagcatc

SEQ ID NO: 81775 - DNA, 25 bp, Homo sapiens
ggcctgacctagtgatccaatctga

SEQ ID NO: 81776 - DNA, 25 bp, Homo sapiens
atttgcgcttctggtcaagacatga

SEQ ID NO: 81777 - DNA, 25 bp, Homo sapiens
tggctttcctggctttggtcctaaa

SEQ ID NO: 81778 - DNA, 25 bp, Homo sapiens
ttggggtccctttaacttctagatc

SEQ ID NO: 81779 - DNA, 25 bp, Homo sapiens
tggcctgagctgatcccaaaactta

SEQ ID NO: 81780 - DNA, 25 bp, Homo sapiens
gtgccacccactgttccataaaaat

SEQ ID NO: 81781 - DNA, 25 bp, Homo sapiens
gcaggcttggctccattttcaaatg

SEQ ID NO: 81782 - DNA, 25 bp, Homo sapiens
tctggccctgccaaaggaatttctg

SEQ ID NO: 81783 - DNA, 25 bp, Homo sapiens
ccacattggtctgctagaagtcttg

SEQ ID NO: 81784 - DNA, 25 bp, Homo sapiens
tgccactttttgtcgaatgatgtta

SEQ ID NO: 81785 - DNA, 25 bp, Homo sapiens
ggtaccttctcctagccacctgata

SEQ ID NO: 81786 - DNA, 25 bp, Homo sapiens
ccttcatggagttgttgagccagca

SEQ ID NO: 81787 - DNA, 25 bp, Homo sapiens
caacccttctctggctctagatgga

SEQ ID NO: 81788 - DNA, 25 bp, Homo sapiens
cctggccacctacatggaaatatta

SEQ ID NO: 81789 - DNA, 25 bp, Homo sapiens
tcctatgaggagctgacaaattttc

SEQ ID NO: 81790 - DNA, 25 bp, Homo sapiens
ggggaactcttcttcttcactgata

SEQ ID NO: 81791 - DNA, 25 bp, Homo sapiens
ccagcagtaccaggaatggcagtta

SEQ ID NO: 81792 - DNA, 25 bp, Homo sapiens
gccttccgaaggtcattgtcaactg

SEQ ID NO: 81793 - DNA, 25 bp, Homo sapiens
tggccctagaatgtacaaatttgtg

SEQ ID NO: 81794 - DNA, 25 bp, Homo sapiens
gtaagccatcttgaatccttcctga

SEQ ID NO: 81795 - DNA, 25 bp, Homo sapiens
cgtcagttgactggaacacatctca

SEQ ID NO: 81796 - DNA, 25 bp, Homo sapiens
gatgccatttgacacctacttaagc

SEQ ID NO: 81797 - DNA, 25 bp, Homo sapiens
ggagcctacgcttaccctaaaatga

SEQ ID NO: 81798 - DNA, 25 bp, Homo sapiens
tcactgctgagcatcctggatttga

SEQ ID NO: 81799 - DNA, 25 bp, Homo sapiens
gggcacaggccactcacattttaga

SEQ ID NO: 81800 - DNA, 25 bp, Homo sapiens
tctactcctggagaggcatgaactc

SEQ ID NO: 81801 - DNA, 25 bp, Homo sapiens
caggggactgcactaatttttactc

SEQ ID NO: 81802 - DNA, 25 bp, Homo sapiens
cacctgtgggagaagccaagctatc

SEQ ID NO: 81803 - DNA, 25 bp, Homo sapiens
gtgtacgctccaggtctgcatgata

SEQ ID NO: 81804 - DNA, 25 bp, Homo sapiens
gtaataacagcccacgtgcagcagg

SEQ ID NO: 81805 - DNA, 25 bp, Homo sapiens
aggtgcctactacttccaaccagag

SEQ ID NO: 81806 - DNA, 25 bp, Homo sapiens
ccagtccgagtgaaatgtgcccttt

SEQ ID NO: 81807 - DNA, 25 bp, Homo sapiens
ccctgccgcatggtcttatattaac

SEQ ID NO: 81808 - DNA, 25 bp, Homo sapiens
ggtgctgctactctttccttgctta

SEQ ID NO: 81809 - DNA, 25 bp, Homo sapiens
tctatttgcttttaaacaaagccat

SEQ ID NO: 81810 - DNA, 25 bp, Homo sapiens
ccttggccagactcaagagtgatta

SEQ ID NO: 81811 - DNA, 25 bp, Homo sapiens
tgggactcactttatggcatattgc

SEQ ID NO: 81812 - DNA, 25 bp, Homo sapiens
tggttttatggctatcttgctcaga

SEQ ID NO: 81813 - DNA, 25 bp, Homo sapiens
ttatgggatcctcctgcccaaaaaa

SEQ ID NO: 81814 - DNA, 25 bp, Homo sapiens
caggggactcacagtttgcaaactc

SEQ ID NO: 81815 - DNA, 25 bp, Homo sapiens
gtacctacctcagagaatgttgatg

SEQ ID NO: 81816 - DNA, 25 bp, Homo sapiens
aagcgatgtttttcagccaatatcc

SEQ ID NO: 81817 - DNA, 25 bp, Homo sapiens
tcgtgcttgcttcagatggctcttg

SEQ ID NO: 81818 - DNA, 25 bp, Homo sapiens
tagggtccagacgttttcattttgc

SEQ ID NO: 81819 - DNA, 25 bp, Homo sapiens
gtgtctggttcccttcctggaatta

SEQ ID NO: 81820 - DNA, 25 bp, Homo sapiens
gtcccagggccatgacagcttctta

SEQ ID NO: 81821 - DNA, 25 bp, Homo sapiens
cccaggcctgttttgattgtttgtc

SEQ ID NO: 81822 - DNA, 25 bp, Homo sapiens
atctgtccacccactcaagttagct

SEQ ID NO: 81823 - DNA, 25 bp, Homo sapiens
tcacagcgttacaccaagggcagtc

SEQ ID NO: 81824 - DNA, 25 bp, Homo sapiens
ggagcggcttccaactcaccttgtc

SEQ ID NO: 81825 - DNA, 25 bp, Homo sapiens
tggtttgtcccatgccaacggctag

SEQ ID NO: 81826 - DNA, 25 bp, Homo sapiens
cccacttagggaatgtccatgtttc

SEQ ID NO: 81827 - DNA, 25 bp, Homo sapiens
ggatctcctcctttctacagctgtg

SEQ ID NO: 81828 - DNA, 25 bp, Homo sapiens
aactctgtgttttgcattgtgaccc

SEQ ID NO: 81829 - DNA, 25 bp, Homo sapiens
cactttatgggttgggttgggaatc

SEQ ID NO: 81830 - DNA, 25 bp, Homo sapiens
caagtccttggattaaccttttatc

SEQ ID NO: 81831 - DNA, 25 bp, Homo sapiens
gggctttggccatcttggtctttta

SEQ ID NO: 81832 - DNA, 25 bp, Homo sapiens
cagcttcctcaagttggtacggata

SEQ ID NO: 81833 - DNA, 25 bp, Homo sapiens
cagggtggcttccttgcctttaaca

SEQ ID NO: 81834 - DNA, 25 bp, Homo sapiens
ccagactgtttcctgtcaagtagca

SEQ ID NO: 81835 - DNA, 25 bp, Homo sapiens
tggctaatcttcctcctagtggcta

SEQ ID NO: 81836 - DNA, 25 bp, Homo sapiens
gttggcatgctaatcccatctgtta

SEQ ID NO: 81837 - DNA, 25 bp, Homo sapiens
tggccacagggacagagcaaaaatg

SEQ ID NO: 81838 - DNA, 25 bp, Homo sapiens
tttactggtgggaacaaaggcctgc

SEQ ID NO: 81839 - DNA, 25 bp, Homo sapiens
ggggcccacggtcttgtaacagaac

SEQ ID NO: 81840 - DNA, 25 bp, Homo sapiens
ggaaggtgacctgcccaaagagtta

SEQ ID NO: 81841 - DNA, 25 bp, Homo sapiens
tggatagtctgccttgcctacttta

SEQ ID NO: 81842 - DNA, 25 bp, Homo sapiens
ttctaccaggctgagcaagttttgc

SEQ ID NO: 81843 - DNA, 25 bp, Homo sapiens
taacgtcttaactccagggctttaa

SEQ ID NO: 81844 - DNA, 25 bp, Homo sapiens
agggcagcagacatacctgttttta

SEQ ID NO: 81845 - DNA, 25 bp, Homo sapiens
ctcctgactgatttggggctgaaca

SEQ ID NO: 81846 - DNA, 25 bp, Homo sapiens
ccttctctctttgtgtgtatatatg

SEQ ID NO: 81847 - DNA, 25 bp, Homo sapiens
gagttaatttcatctacaaaaatag

SEQ ID NO: 81848 - DNA, 25 bp, Homo sapiens
gcatcccagggatacaaacagttca

SEQ ID NO: 81849 - DNA, 25 bp, Homo sapiens
agacccagtctgctccaatacatga

SEQ ID NO: 81850 - DNA, 25 bp, Homo sapiens
tattttcaactttttgatgtctgcc

SEQ ID NO: 81851 - DNA, 25 bp, Homo sapiens
taatctcagccttagaatgataact

SEQ ID NO: 81852 - DNA, 25 bp, Homo sapiens
cgcatagctgctttgtgcttaaacc

SEQ ID NO: 81853 - DNA, 25 bp, Homo sapiens
ctggattctggctgctcacatggta

SEQ ID NO: 81854 - DNA, 25 bp, Homo sapiens
ccctagggagtgaagcagccttata

SEQ ID NO: 81855 - DNA, 25 bp, Homo sapiens
ccctacgccttgactgatgtttgta

SEQ ID NO: 81856 - DNA, 25 bp, Homo sapiens
ctctcttgtaattggggagcctcta

SEQ ID NO: 81857 - DNA, 25 bp, Homo sapiens
gcctagttgctgtgtgtctgttctc

SEQ ID NO: 81858 - DNA, 25 bp, Homo sapiens
gtacttgggcattacttgtttaacc

SEQ ID NO: 81859 - DNA, 25 bp, Homo sapiens
gcttgcagagcacttccattttgga

SEQ ID NO: 81860 - DNA, 25 bp, Homo sapiens
tgggtcagtggtcgtcattcatata

SEQ ID NO: 81861 - DNA, 25 bp, Homo sapiens
agcgacagttttatttcccacagca

SEQ ID NO: 81862 - DNA, 25 bp, Homo sapiens
tccctggttggagacttttcacaca

SEQ ID NO: 81863 - DNA, 25 bp, Homo sapiens
tgcatgatttcactcaccaaatgtg

SEQ ID NO: 81864 - DNA, 25 bp, Homo sapiens
ggctctattggcctcctgctaatgc

SEQ ID NO: 81865 - DNA, 25 bp, Homo sapiens
ggtagccgctaacaatactcaaatg

SEQ ID NO: 81866 - DNA, 25 bp, Homo sapiens
cctggggatgaagcacccgccttaa

SEQ ID NO: 81867 - DNA, 25 bp, Homo sapiens
ggctctcgtccatcacctaaggtga

SEQ ID NO: 81868 - DNA, 25 bp, Homo sapiens
gctcttcaagatctgctgctcccta

SEQ ID NO: 81869 - DNA, 25 bp, Homo sapiens
catcttagttatttcttgtcttttg

SEQ ID NO: 81870 - DNA, 25 bp, Homo sapiens
tacttagtatgatgattgagaaata

SEQ ID NO: 81871 - DNA, 25 bp, Homo sapiens
ggtacattgccttgatcctctctga

SEQ ID NO: 81872 - DNA, 25 bp, Homo sapiens
tgcaaactgcagctcctaggcccta

SEQ ID NO: 81873 - DNA, 25 bp, Homo sapiens
aggtacctgtttccaagctgaatgc

SEQ ID NO: 81874 - DNA, 25 bp, Homo sapiens
ctgacttagtcctgagccttgccta

SEQ ID NO: 81875 - DNA, 25 bp, Homo sapiens
tgccagccagaaagttcaaacaacc

SEQ ID NO: 81876 - DNA, 25 bp, Homo sapiens
tgtcagacctgttcactagacatta

SEQ ID NO: 81877 - DNA, 25 bp, Homo sapiens
ctcaggatttgccatgtagaccaga

SEQ ID NO: 81878 - DNA, 25 bp, Homo sapiens
tctgacaggatccaatctgggttcc

SEQ ID NO: 81879 - DNA, 25 bp, Homo sapiens
tgagatccacagctgggcccttagc

SEQ ID NO: 81880 - DNA, 25 bp, Homo sapiens
gcctccaactccttacctagatata

SEQ ID NO: 81881 - DNA, 25 bp, Homo sapiens
atatattttaaaaagtgtacatttg

SEQ ID NO: 81882 - DNA, 25 bp, Homo sapiens
tgggacttcccattcaacatagatg

SEQ ID NO: 81883 - DNA, 25 bp, Homo sapiens
ggcagggtgactagacctgagatta

SEQ ID NO: 81884 - DNA, 25 bp, Homo sapiens
gcccttgtcatcctttaaggccatg

SEQ ID NO: 81885 - DNA, 25 bp, Homo sapiens
cttagattatttactgtgccagttg

SEQ ID NO: 81886 - DNA, 25 bp, Homo sapiens
aatacatataagatctctaaaaata

SEQ ID NO: 81887 - DNA, 25 bp, Homo sapiens
cttctctggctgtgtcttgctgaca

SEQ ID NO: 81888 - DNA, 25 bp, Homo sapiens
ggcattgcaggcaaactatagtttg

SEQ ID NO: 81889 - DNA, 25 bp, Homo sapiens
gttttagccaggcaaaacagacaaa

SEQ ID NO: 81890 - DNA, 25 bp, Homo sapiens
ttgtggggttgccactaaatagcag

SEQ ID NO: 81891 - DNA, 25 bp, Homo sapiens
aatgcttagcattccctcctgaagg

SEQ ID NO: 81892 - DNA, 25 bp, Homo sapiens
agatagataggtatagatagacatc

SEQ ID NO: 81893 - DNA, 25 bp, Homo sapiens
tgtttgattacttgatgaaggtagt

SEQ ID NO: 81894 - DNA, 25 bp, Homo sapiens
tacatatgtgtatgtgtgcatattt

SEQ ID NO: 81895 - DNA, 25 bp, Homo sapiens
catggtagtcccaaaacaatgttat

SEQ ID NO: 81896 - DNA, 25 bp, Homo sapiens
gtgggcattccaaaagttcagcata

SEQ ID NO: 81897 - DNA, 25 bp, Homo sapiens
accctatggcagtggacttttgttc

SEQ ID NO: 81898 - DNA, 25 bp, Homo sapiens
tttggccgtacaaaccagcctggtc

SEQ ID NO: 81899 - DNA, 25 bp, Homo sapiens
ctgggcaaattagtctgctgtaata

SEQ ID NO: 81900 - DNA, 25 bp, Homo sapiens
gactcaaggttgaaggtctccagta

SEQ ID NO: 81901 - DNA, 25 bp, Homo sapiens
tggtggccagtcagtcttcaacagc

SEQ ID NO: 81902 - DNA, 25 bp, Homo sapiens
acagggctttctctctgccttagaa

SEQ ID NO: 81903 - DNA, 25 bp, Homo sapiens
cccacaagtgcatgggagtctgatc

SEQ ID NO: 81904 - DNA, 25 bp, Homo sapiens
agcccatgctctgcaccagtgtttc

SEQ ID NO: 81905 - DNA, 25 bp, Homo sapiens
gctgcctactggacaactgtgcata

SEQ ID NO: 81906 - DNA, 25 bp, Homo sapiens
ttccaccaatggcaaggagcggtta

SEQ ID NO: 81907 - DNA, 25 bp, Homo sapiens
ttctccatgtgtggtccagccttcc

SEQ ID NO: 81908 - DNA, 25 bp, Homo sapiens
agtcttggccacttcacttcagatg

SEQ ID NO: 81909 - DNA, 25 bp, Homo sapiens
atacatgaccaagaaacattcttct

SEQ ID NO: 81910 - DNA, 25 bp, Homo sapiens
gccatgggagaaccttaccatttta

SEQ ID NO: 81911 - DNA, 25 bp, Homo sapiens
ttgttgagatgacccaggacctgga

SEQ ID NO: 81912 - DNA, 25 bp, Homo sapiens
tgtgcacaccttgttcagatacttc

SEQ ID NO: 81913 - DNA, 25 bp, Homo sapiens
ggcttatgcatggtctgtcacactg

SEQ ID NO: 81914 - DNA, 25 bp, Homo sapiens
gggaccttctgctataattcatttg

SEQ ID NO: 81915 - DNA, 25 bp, Homo sapiens
ataaaaatttaaaaaatgctctcct

SEQ ID NO: 81916 - DNA, 25 bp, Homo sapiens
gttcaggcccaggacagagatttta

SEQ ID NO: 81917 - DNA, 25 bp, Homo sapiens
gcccagttgctgatggtagctaaga

SEQ ID NO: 81918 - DNA, 25 bp, Homo sapiens
ttgtcctcggaaagcttataacctg

SEQ ID NO: 81919 - DNA, 25 bp, Homo sapiens
ggcaggcccagaagccctgttttga

SEQ ID NO: 81920 - DNA, 25 bp, Homo sapiens
cccaaactgggatgttgtgctagta

SEQ ID NO: 81921 - DNA, 25 bp, Homo sapiens
catagaacgaaagccaggttactta

SEQ ID NO: 81922 - DNA, 25 bp, Homo sapiens
caggcatggggcacatctacacatc

SEQ ID NO: 81923 - DNA, 25 bp, Homo sapiens
tcctgctgaagcttgtggccacatc

SEQ ID NO: 81924 - DNA, 25 bp, Homo sapiens
ctgctgctgggtctacaaataaata

SEQ ID NO: 81925 - DNA, 25 bp, Homo sapiens
ctgagagccctggttatatgccata

SEQ ID NO: 81926 - DNA, 25 bp, Homo sapiens
gtgttgttcctcgttcctccagatg

SEQ ID NO: 81927 - DNA, 25 bp, Homo sapiens
ttgcggggacaggactaacatcagt

SEQ ID NO: 81928 - DNA, 25 bp, Homo sapiens
cctggttacggttggtcatagactc

SEQ ID NO: 81929 - DNA, 25 bp, Homo sapiens
actcccatgtgtctttactagcata

SEQ ID NO: 81930 - DNA, 25 bp, Homo sapiens
tcccagcatcttctaggtccacagg

SEQ ID NO: 81931 - DNA, 25 bp, Homo sapiens
gctgtcagccctaccagaatatgtg

SEQ ID NO: 81932 - DNA, 25 bp, Homo sapiens
ttatactgggaatgctgtattacaa

SEQ ID NO: 81933 - DNA, 25 bp, Homo sapiens
acctatattctaaacagtcatgatc

SEQ ID NO: 81934 - DNA, 25 bp, Homo sapiens
cacacacataggctgctggtaaata

SEQ ID NO: 81935 - DNA, 25 bp, Homo sapiens
agtgcccatcctcaaagaagtcttc

SEQ ID NO: 81936 - DNA, 25 bp, Homo sapiens
tgctgctgcctaggaccacaatgga

SEQ ID NO: 81937 - DNA, 25 bp, Homo sapiens
tgcaacttgaactgccctttaaagg

SEQ ID NO: 81938 - DNA, 25 bp, Homo sapiens
aggctctaggcctatgtcaattgga

SEQ ID NO: 81939 - DNA, 25 bp, Homo sapiens
tggtcctagagacaagtgcgaactt

SEQ ID NO: 81940 - DNA, 25 bp, Homo sapiens
aggactacttttatcgtgcaggaga

SEQ ID NO: 81941 - DNA, 25 bp, Homo sapiens
ctgttagagcaagcagaatattcat

SEQ ID NO: 81942 - DNA, 25 bp, Homo sapiens
tttgaaaaaattagaagacaaaagt

SEQ ID NO: 81943 - DNA, 25 bp, Homo sapiens
attcatttctcttcatgcctcctga

SEQ ID NO: 81944 - DNA, 25 bp, Homo sapiens
tataaaagtactccatcttgacaga

SEQ ID NO: 81945 - DNA, 25 bp, Homo sapiens
aagccaggcttcattgctgcacaga

SEQ ID NO: 81946 - DNA, 25 bp, Homo sapiens
agagccactgagttcctagtctgga

SEQ ID NO: 81947 - DNA, 25 bp, Homo sapiens
ggcaggctcccatcatagcagtaaa

SEQ ID NO: 81948 - DNA, 25 bp, Homo sapiens
gttcactaactaggagcatgttctc

SEQ ID NO: 81949 - DNA, 25 bp, Homo sapiens
ctgtttccgaactagccaatgagtg

SEQ ID NO: 81950 - DNA, 25 bp, Homo sapiens
acaccatgctttctgattcaaggga

SEQ ID NO: 81951 - DNA, 25 bp, Homo sapiens
tgtacgtaggcttgctcacacacta

SEQ ID NO: 81952 - DNA, 25 bp, Homo sapiens
atcacatgaacgcaaaaataaaaaa

SEQ ID NO: 81953 - DNA, 25 bp, Homo sapiens
ggacagtacttacaacatagtacat

SEQ ID NO: 81954 - DNA, 25 bp, Homo sapiens
ttctgtgtgctacgaggtgctttta

SEQ ID NO: 81955 - DNA, 25 bp, Homo sapiens
ttgctgctcttttggacctgtaata

SEQ ID NO: 81956 - DNA, 25 bp, Homo sapiens
gtaactctgactatgtcggcagcca

SEQ ID NO: 81957 - DNA, 25 bp, Homo sapiens
tggcccatttgactccctctcttaa

SEQ ID NO: 81958 - DNA, 25 bp, Homo sapiens
gcggcatacgttttggcctcttata

SEQ ID NO: 81959 - DNA, 25 bp, Homo sapiens
gccaggtcctgttggcaacttattc

SEQ ID NO: 81960 - DNA, 25 bp, Homo sapiens
cccttttcagggttagcaaatctta

SEQ ID NO: 81961 - DNA, 25 bp, Homo sapiens
ttctggtgatcccatgaagacctca

SEQ ID NO: 81962 - DNA, 25 bp, Homo sapiens
gagaatcagtcacccttctttgaga

SEQ ID NO: 81963 - DNA, 25 bp, Homo sapiens
ccctctgaggctgaaagggttctca

SEQ ID NO: 81964 - DNA, 25 bp, Homo sapiens
tcagggtttggggaacaatcatcaa

SEQ ID NO: 81965 - DNA, 25 bp, Homo sapiens
aggggatcactgtctttagcaatta

SEQ ID NO: 81966 - DNA, 25 bp, Homo sapiens
aacccttgatgcatagcttcttgga

SEQ ID NO: 81967 - DNA, 25 bp, Homo sapiens
gaagctggtgcatatcatcctcata

SEQ ID NO: 81968 - DNA, 25 bp, Homo sapiens
ttgtgcgggctcttatatcatccta

SEQ ID NO: 81969 - DNA, 25 bp, Homo sapiens
gattggttgacactcaggatcctta

SEQ ID NO: 81970 - DNA, 25 bp, Homo sapiens
tcaggggatgtttcctaaaggtttc

SEQ ID NO: 81971 - DNA, 25 bp, Homo sapiens
agggttctaagttcttccaattggc

SEQ ID NO: 81972 - DNA, 25 bp, Homo sapiens
tgtgagcccacctagtgacaaagta

SEQ ID NO: 81973 - DNA, 25 bp, Homo sapiens
tcccaggttttagccaagggcagga

SEQ ID NO: 81974 - DNA, 25 bp, Homo sapiens
ctgcgatgccaggatttgaacttca

SEQ ID NO: 81975 - DNA, 25 bp, Homo sapiens
ataaatagctttagtgacgcctccc

SEQ ID NO: 81976 - DNA, 25 bp, Homo sapiens
aaccacctgtgtctcctttgggaga

SEQ ID NO: 81977 - DNA, 25 bp, Homo sapiens
agtacctatgcctccaaaccagtca

SEQ ID NO: 81978 - DNA, 25 bp, Homo sapiens
ggttggaaaacatattttaaacaaa

SEQ ID NO: 81979 - DNA, 25 bp, Homo sapiens
ttcccctcctgggataggcttggta

SEQ ID NO: 81980 - DNA, 25 bp, Homo sapiens
tcaaattgattattttaaaacattg

SEQ ID NO: 81981 - DNA, 25 bp, Homo sapiens
taaaattctctttgaaaatgataag

SEQ ID NO: 81982 - DNA, 25 bp, Homo sapiens
gcacggcctttcttaaatgatctta

SEQ ID NO: 81983 - DNA, 25 bp, Homo sapiens
cttgcggggttaacagcagcatctc

SEQ ID NO: 81984 - DNA, 25 bp, Homo sapiens
tcccaatgtacccagtccatagaga

SEQ ID NO: 81985 - DNA, 25 bp, Homo sapiens
gtccagggaacatctataacgtgca

SEQ ID NO: 81986 - DNA, 25 bp, Homo sapiens
agcctgggagggatttttgaagttc

SEQ ID NO: 81987 - DNA, 25 bp, Homo sapiens
ctgagaaacctgtgccaagacaatc

SEQ ID NO: 81988 - DNA, 25 bp, Homo sapiens
gtactcaaatggagcaggaagtgga

SEQ ID NO: 81989 - DNA, 25 bp, Homo sapiens
cttgccagttttttgactcagtgta

SEQ ID NO: 81990 - DNA, 25 bp, Homo sapiens
tggcatggccatgtaccctcagacc

SEQ ID NO: 81991 - DNA, 25 bp, Homo sapiens
ctgctggcctctatcagtaacagga

SEQ ID NO: 81992 - DNA, 25 bp, Homo sapiens
tgctggattagatggagacacgttc

SEQ ID NO: 81993 - DNA, 25 bp, Homo sapiens
ccaagccctgtctgtagttaaccaa

SEQ ID NO: 81994 - DNA, 25 bp, Homo sapiens
atggactctcttgcacagcatgcta

SEQ ID NO: 81995 - DNA, 25 bp, Homo sapiens
gacgctttgaatactgcaggaaatg

SEQ ID NO: 81996 - DNA, 25 bp, Homo sapiens
tgccagccaggccttagaaaatcta

SEQ ID NO: 81997 - DNA, 25 bp, Homo sapiens
cttgtgtgcaagtagatggaccaga

SEQ ID NO: 81998 - DNA, 25 bp, Homo sapiens
aaataattattacacattaatcctg

SEQ ID NO: 81999 - DNA, 25 bp, Homo sapiens
tggagctgcagttcttttcaaagtg

SEQ ID NO: 82000 - DNA, 25 bp, Homo sapiens
ggctcgtctgtgatgaggcccaaca

SEQ ID NO: 82001 - DNA, 25 bp, Homo sapiens
ctctggcccagagcgatgttttgta

SEQ ID NO: 82002 - DNA, 25 bp, Homo sapiens
caccttctctaaaatctgggcatga

SEQ ID NO: 82003 - DNA, 25 bp, Homo sapiens
gggacctttggatggtacctcatca

SEQ ID NO: 82004 - DNA, 25 bp, Homo sapiens
tgctggatcccttctactttgagtg

SEQ ID NO: 82005 - DNA, 25 bp, Homo sapiens
caaatatctgtaggtaaaataatat

SEQ ID NO: 82006 - DNA, 25 bp, Homo sapiens
tgattgtttctaattcagtctaaca

SEQ ID NO: 82007 - DNA, 25 bp, Homo sapiens
ccctcctccaagaaagtgtcagatt

SEQ ID NO: 82008 - DNA, 25 bp, Homo sapiens
gtgatcctatctgttttcctgccca

SEQ ID NO: 82009 - DNA, 25 bp, Homo sapiens
tctcccatgtgcaaggctacatttg

SEQ ID NO: 82010 - DNA, 25 bp, Homo sapiens
cctggcaatgctgtctgtctctgta

SEQ ID NO: 82011 - DNA, 25 bp, Homo sapiens
gagctgctgaaagaggctagagcag

SEQ ID NO: 82012 - DNA, 25 bp, Homo sapiens
ggatgaatgatcttaaacactttag

SEQ ID NO: 82013 - DNA, 25 bp, Homo sapiens
gcaggcgactcacctctttacaagg

SEQ ID NO: 82014 - DNA, 25 bp, Homo sapiens
ctcaagtcctgtagatgcccaaatg

SEQ ID NO: 82015 - DNA, 25 bp, Homo sapiens
gcgtcattaattcttccagcctggg

SEQ ID NO: 82016 - DNA, 25 bp, Homo sapiens
ttcgggatcacagaaagtttcacta

SEQ ID NO: 82017 - DNA, 25 bp, Homo sapiens
ctcccactttggttttgcatacaga

SEQ ID NO: 82018 - DNA, 25 bp, Homo sapiens
aaccaaagtgggaggacagatacta

SEQ ID NO: 82019 - DNA, 25 bp, Homo sapiens
cagaccctggatttgttggcagcta

SEQ ID NO: 82020 - DNA, 25 bp, Homo sapiens
tgccttgatgcaaatgaagtgtctc

SEQ ID NO: 82021 - DNA, 25 bp, Homo sapiens
tgtcaccttggaaacaggaaccagg

SEQ ID NO: 82022 - DNA, 25 bp, Homo sapiens
cacagttcaggactttgggcagcca

SEQ ID NO: 82023 - DNA, 25 bp, Homo sapiens
gtagatattcttcacaggcaccctg

SEQ ID NO: 82024 - DNA, 25 bp, Homo sapiens
tgggttccatccctaggagaatata

SEQ ID NO: 82025 - DNA, 25 bp, Homo sapiens
tccagtggcactagatcaatttgtc

SEQ ID NO: 82026 - DNA, 25 bp, Homo sapiens
gctgccatcatgtgggaaattaatc

SEQ ID NO: 82027 - DNA, 25 bp, Homo sapiens
cctcattacggactgttagcacatc

SEQ ID NO: 82028 - DNA, 25 bp, Homo sapiens
aagccttttgatctgactctgtgta

SEQ ID NO: 82029 - DNA, 25 bp, Homo sapiens
tcccaagttctgtgtgaaacctgga

SEQ ID NO: 82030 - DNA, 25 bp, Homo sapiens
agctgggacacctagagaatatatc

SEQ ID NO: 82031 - DNA, 25 bp, Homo sapiens
caggatctctggctctccgtaaatc

SEQ ID NO: 82032 - DNA, 25 bp, Homo sapiens
tgcttgcatacctagacctcgcctg

SEQ ID NO: 82033 - DNA, 25 bp, Homo sapiens
tcccaggtgacaagttcagagttta

SEQ ID NO: 82034 - DNA, 25 bp, Homo sapiens
cctgtggcagcatgcactctagcta

SEQ ID NO: 82035 - DNA, 25 bp, Homo sapiens
agattgcccaagaatagtttccagc

SEQ ID NO: 82036 - DNA, 25 bp, Homo sapiens
ctctcatgttggcagggaattccta

SEQ ID NO: 82037 - DNA, 25 bp, Homo sapiens
cctgtgttcatagtcctgtgttata

SEQ ID NO: 82038 - DNA, 25 bp, Homo sapiens
actcctggagaccaagcacttctta

SEQ ID NO: 82039 - DNA, 25 bp, Homo sapiens
tacagccagggaagacaaattgatc

SEQ ID NO: 82040 - DNA, 25 bp, Homo sapiens
gcctagcaatgtgagtaccaaagtt

SEQ ID NO: 82041 - DNA, 25 bp, Homo sapiens
ggtccctggaggaataccttctgta

SEQ ID NO: 82042 - DNA, 25 bp, Homo sapiens
ctggacatcctcaagctagaactaa

SEQ ID NO: 82043 - DNA, 25 bp, Homo sapiens
gcaactaacgttccctgtggtaatg

SEQ ID NO: 82044 - DNA, 25 bp, Homo sapiens
ctgtgtgaatcaaaaaggaggcctg

SEQ ID NO: 82045 - DNA, 25 bp, Homo sapiens
ggcagaatttcctcacccttgtaga

SEQ ID NO: 82046 - DNA, 25 bp, Homo sapiens
ctatcctaggaaaaaactatcattc

SEQ ID NO: 82047 - DNA, 25 bp, Homo sapiens
ggtcctcttgtacttctgctctttc

SEQ ID NO: 82048 - DNA, 25 bp, Homo sapiens
gctcgattcccacaagagaaaggta

SEQ ID NO: 82049 - DNA, 25 bp, Homo sapiens
tccaaggcattcaaagcatgttttc

SEQ ID NO: 82050 - DNA, 25 bp, Homo sapiens
aaaaccaaaaatacaaaacagttgg

SEQ ID NO: 82051 - DNA, 25 bp, Homo sapiens
ggttggcaacttccttcactgcagc

SEQ ID NO: 82052 - DNA, 25 bp, Homo sapiens
tcctctgggagcatctctaagaata

SEQ ID NO: 82053 - DNA, 25 bp, Homo sapiens
agtgctctctgtggttaagaactgc

SEQ ID NO: 82054 - DNA, 25 bp, Homo sapiens
tgctgagctaaaatctgaatgcctg

SEQ ID NO: 82055 - DNA, 25 bp, Homo sapiens
tgctccctcatgtccacaaatatgg

SEQ ID NO: 82056 - DNA, 25 bp, Homo sapiens
tttcaggtcactgagcaactgagtg

SEQ ID NO: 82057 - DNA, 25 bp, Homo sapiens
gggctctggctatgttttatttcta

SEQ ID NO: 82058 - DNA, 25 bp, Homo sapiens
taggcccatgggttagattccattc

SEQ ID NO: 82059 - DNA, 25 bp, Homo sapiens
aaaggtcgactttcattggccaata

SEQ ID NO: 82060 - DNA, 25 bp, Homo sapiens
ctgtctttggtagcactgaacttta

SEQ ID NO: 82061 - DNA, 25 bp, Homo sapiens
ttcttgggtcctgcttcttgaaagc

SEQ ID NO: 82062 - DNA, 25 bp, Homo sapiens
ctcctccggggtttcttattgaact

SEQ ID NO: 82063 - DNA, 25 bp, Homo sapiens
gtcaaaagaaccagatgactatata

SEQ ID NO: 82064 - DNA, 25 bp, Homo sapiens
tctaccttcagtgtttggccaacta

SEQ ID NO: 82065 - DNA, 25 bp, Homo sapiens
gctactcctaggctctgatcacaga

SEQ ID NO: 82066 - DNA, 25 bp, Homo sapiens
ttcagtctctggaaacagctggttg

SEQ ID NO: 82067 - DNA, 25 bp, Homo sapiens
cttggtggtcctgctagtatctcta

SEQ ID NO: 82068 - DNA, 25 bp, Homo sapiens
tctgctggaattgagctcagtacca

SEQ ID NO: 82069 - DNA, 25 bp, Homo sapiens
tccaggctgagtgtagaagttgaca

SEQ ID NO: 82070 - DNA, 25 bp, Homo sapiens
gtgatacgtggcttgctaaaactgc

SEQ ID NO: 82071 - DNA, 25 bp, Homo sapiens
agagaccctgtctgtataactacta

SEQ ID NO: 82072 - DNA, 25 bp, Homo sapiens
tgactgggtccctgaaacttatttc

SEQ ID NO: 82073 - DNA, 25 bp, Homo sapiens
tgcctcctacccagttcagtatatg

SEQ ID NO: 82074 - DNA, 25 bp, Homo sapiens
ctgctagtttgggttcacattgtga

SEQ ID NO: 82075 - DNA, 25 bp, Homo sapiens
gtatcaactctatcagcagctgtgg

SEQ ID NO: 82076 - DNA, 25 bp, Homo sapiens
gctgcctcctagtctgtttaacgtg

SEQ ID NO: 82077 - DNA, 25 bp, Homo sapiens
gcctgcaagggctatcaatcatttc

SEQ ID NO: 82078 - DNA, 25 bp, Homo sapiens
agtattactatagactcctagactc

SEQ ID NO: 82079 - DNA, 25 bp, Homo sapiens
agattaattcttttttgtacccttt

SEQ ID NO: 82080 - DNA, 25 bp, Homo sapiens
aaacatgtatttagtttttcagcta

SEQ ID NO: 82081 - DNA, 25 bp, Homo sapiens
cataaagaaggcataaagaagagtt

SEQ ID NO: 82082 - DNA, 25 bp, Homo sapiens
agacctctatcttgccttgttttca

SEQ ID NO: 82083 - DNA, 25 bp, Homo sapiens
tggggaacgttgacctatacatggc

SEQ ID NO: 82084 - DNA, 25 bp, Homo sapiens
gtaagtggatgaacagaggagcgag

SEQ ID NO: 82085 - DNA, 25 bp, Homo sapiens
acacagcctgttgtagtcagccaga

SEQ ID NO: 82086 - DNA, 25 bp, Homo sapiens
gcccagccctgtaagaaaccagaga

SEQ ID NO: 82087 - DNA, 25 bp, Homo sapiens
ttcttcaaagtgcaggctgtgcaga

SEQ ID NO: 82088 - DNA, 25 bp, Homo sapiens
ctccagtccctcgtgcacaataata

SEQ ID NO: 82089 - DNA, 25 bp, Homo sapiens
ctctggcttctggtaacttgcattc

SEQ ID NO: 82090 - DNA, 25 bp, Homo sapiens
gagcgtcctcttttgatgatccaga

SEQ ID NO: 82091 - DNA, 25 bp, Homo sapiens
cccgagaactctgaaattgccatta

SEQ ID NO: 82092 - DNA, 25 bp, Homo sapiens
ctctaaggtagttttaaagggcagc

SEQ ID NO: 82093 - DNA, 25 bp, Homo sapiens
tttccctttggagacaagattttga

SEQ ID NO: 82094 - DNA, 25 bp, Homo sapiens
cctagactgtctgtggcagagctta

SEQ ID NO: 82095 - DNA, 25 bp, Homo sapiens
ccctgcaggcaaggaaacttattta

SEQ ID NO: 82096 - DNA, 25 bp, Homo sapiens
ggtctcagtcattcctcagagttgg

SEQ ID NO: 82097 - DNA, 25 bp, Homo sapiens
gccttagactcccttattacactgg

SEQ ID NO: 82098 - DNA, 25 bp, Homo sapiens
attgcctctacttccatgtcattga

SEQ ID NO: 82099 - DNA, 25 bp, Homo sapiens
cctagggccattgactcagaaagtc

SEQ ID NO: 82100 - DNA, 25 bp, Homo sapiens
acctcctcaagggtctgtgtgaaga

SEQ ID NO: 82101 - DNA, 25 bp, Homo sapiens
acctggactcctagaacagttttgg

SEQ ID NO: 82102 - DNA, 25 bp, Homo sapiens
ctgacccgtgttatatatgccttga

SEQ ID NO: 82103 - DNA, 25 bp, Homo sapiens
gggaggctcccatactcaagtaata

SEQ ID NO: 82104 - DNA, 25 bp, Homo sapiens
ggaggtacctaacagaaagccctta

SEQ ID NO: 82105 - DNA, 25 bp, Homo sapiens
ggcgcattgcttgtcttacactgta

SEQ ID NO: 82106 - DNA, 25 bp, Homo sapiens
gccctgtgtacctatgtagtcagta

SEQ ID NO: 82107 - DNA, 25 bp, Homo sapiens
ggctgcccttcgtctcttactcaaa

SEQ ID NO: 82108 - DNA, 25 bp, Homo sapiens
ggaccagaggacttccagctacatg

SEQ ID NO: 82109 - DNA, 25 bp, Homo sapiens
cctggcaatggggtatgacttatat

SEQ ID NO: 82110 - DNA, 25 bp, Homo sapiens
tcctctggagtcagtaccatttttg

SEQ ID NO: 82111 - DNA, 25 bp, Homo sapiens
gatggccttgccctattgagcttaa

SEQ ID NO: 82112 - DNA, 25 bp, Homo sapiens
ggattaaaaccctgctttgcctcta

SEQ ID NO: 82113 - DNA, 25 bp, Homo sapiens
ccttctgaggatggtgatgactttt

SEQ ID NO: 82114 - DNA, 25 bp, Homo sapiens
ccactgcagctccaggctatcaggc

SEQ ID NO: 82115 - DNA, 25 bp, Homo sapiens
cctgcagttccaacagtaaaagctg

SEQ ID NO: 82116 - DNA, 25 bp, Homo sapiens
caccttgtgggtattcagaacgctt

SEQ ID NO: 82117 - DNA, 25 bp, Homo sapiens
ttgccctcgtgctaaatgataatgg

SEQ ID NO: 82118 - DNA, 25 bp, Homo sapiens
cctgacgcaagtgtttttggagctc

SEQ ID NO: 82119 - DNA, 25 bp, Homo sapiens
gctgtgctctaccatgggttcagta

SEQ ID NO: 82120 - DNA, 25 bp, Homo sapiens
tgtgtccaccagctgaatgactgta

SEQ ID NO: 82121 - DNA, 25 bp, Homo sapiens
gggcttgactgtattgctacactca

SEQ ID NO: 82122 - DNA, 25 bp, Homo sapiens
atattatgtcttttttatcttcttt

SEQ ID NO: 82123 - DNA, 25 bp, Homo sapiens
atacacgtataatttgaattccata

SEQ ID NO: 82124 - DNA, 25 bp, Homo sapiens
ccttgagggtgccttttgagaaaac

SEQ ID NO: 82125 - DNA, 25 bp, Homo sapiens
gccctttgatgtgttattagccata

SEQ ID NO: 82126 - DNA, 25 bp, Homo sapiens
ccaggtatcacattgcaaggttttc

SEQ ID NO: 82127 - DNA, 25 bp, Homo sapiens
ggttcttcagtgaaccactgtgtga

SEQ ID NO: 82128 - DNA, 25 bp, Homo sapiens
ggctcctagcagagtattccctgtc

SEQ ID NO: 82129 - DNA, 25 bp, Homo sapiens
gggcctaattatgttaagcactctg

SEQ ID NO: 82130 - DNA, 25 bp, Homo sapiens
aggattttctaaggccgtggttgta

SEQ ID NO: 82131 - DNA, 25 bp, Homo sapiens
gctggactaccatgctctgcttgaa

SEQ ID NO: 82132 - DNA, 25 bp, Homo sapiens
ccgccatgaatgagaagggtgtttt

SEQ ID NO: 82133 - DNA, 25 bp, Homo sapiens
agcaggccttcaacaggaggtgttc

SEQ ID NO: 82134 - DNA, 25 bp, Homo sapiens
acctgggaagtcaagcagcagattc

SEQ ID NO: 82135 - DNA, 25 bp, Homo sapiens
cttctgccagcttctattagttatg

SEQ ID NO: 82136 - DNA, 25 bp, Homo sapiens
ccctggtgaaataagtttgatgccc

SEQ ID NO: 82137 - DNA, 25 bp, Homo sapiens
atcgggaaagactatcagtttgtgc

SEQ ID NO: 82138 - DNA, 25 bp, Homo sapiens
atagcaactaataaaaacttaaaag

SEQ ID NO: 82139 - DNA, 25 bp, Homo sapiens
tctaaaataccaagaaaaggcagca

SEQ ID NO: 82140 - DNA, 25 bp, Homo sapiens
gagcccttccaaggatcaaaccatg

SEQ ID NO: 82141 - DNA, 25 bp, Homo sapiens
ttagccatggtaggccagaattatc

SEQ ID NO: 82142 - DNA, 25 bp, Homo sapiens
aacgatctctgaattattgcctaca

SEQ ID NO: 82143 - DNA, 25 bp, Homo sapiens
accttaagacaatttaactgggagg

SEQ ID NO: 82144 - DNA, 25 bp, Homo sapiens
atgtattatatacttccaagtaacc

SEQ ID NO: 82145 - DNA, 25 bp, Homo sapiens
gagtccctagggaagctgtgcttta

SEQ ID NO: 82146 - DNA, 25 bp, Homo sapiens
tcttgcctggaatgacactgctttc

SEQ ID NO: 82147 - DNA, 25 bp, Homo sapiens
gttctgtgtactaacccagggctta

SEQ ID NO: 82148 - DNA, 25 bp, Homo sapiens
ctggagcaaagtagtagattaagac

SEQ ID NO: 82149 - DNA, 25 bp, Homo sapiens
cccagtgccagtcagtctagtgctc

SEQ ID NO: 82150 - DNA, 25 bp, Homo sapiens
tgggaagccagctgatctgacctca

SEQ ID NO: 82151 - DNA, 25 bp, Homo sapiens
cctttcatagggcacaggttgttta

SEQ ID NO: 82152 - DNA, 25 bp, Homo sapiens
ttgtacatgaacagcatgaagcatg

SEQ ID NO: 82153 - DNA, 25 bp, Homo sapiens
cttgtgctggtgagggtatataatc

SEQ ID NO: 82154 - DNA, 25 bp, Homo sapiens
ttatctttcctatttcctgacaaaa

SEQ ID NO: 82155 - DNA, 25 bp, Homo sapiens
ctgctgattcggttgctgcaatgca

SEQ ID NO: 82156 - DNA, 25 bp, Homo sapiens
tctgtggcaatcatagcagtgactc

SEQ ID NO: 82157 - DNA, 25 bp, Homo sapiens
gtgcttctgctgtgcctgttgacta

SEQ ID NO: 82158 - DNA, 25 bp, Homo sapiens
ttctctaaagcaagggcaggcatta

SEQ ID NO: 82159 - DNA, 25 bp, Homo sapiens
tgcatatctatagaaacagcagaga

SEQ ID NO: 82160 - DNA, 25 bp, Homo sapiens
cctgcacactcttttagctggaaac

SEQ ID NO: 82161 - DNA, 25 bp, Homo sapiens
tgatttggcactcaagggcttttcc

SEQ ID NO: 82162 - DNA, 25 bp, Homo sapiens
gctggtcaccattctgtaaaatctg

SEQ ID NO: 82163 - DNA, 25 bp, Homo sapiens
gggcagagtgtgtcaaccaatttca

SEQ ID NO: 82164 - DNA, 25 bp, Homo sapiens
ccgagtcagtacttcaggtggaata

SEQ ID NO: 82165 - DNA, 25 bp, Homo sapiens
gctctgcgtgcctggatcaacatga

SEQ ID NO: 82166 - DNA, 25 bp, Homo sapiens
ttcctcctgtggtgattccagtgtc

SEQ ID NO: 82167 - DNA, 25 bp, Homo sapiens
ctcggagaccaatttcaggtgatta

SEQ ID NO: 82168 - DNA, 25 bp, Homo sapiens
tgtgtctacatctcctggctccgga

SEQ ID NO: 82169 - DNA, 25 bp, Homo sapiens
tgggtcacttcaccacaaaattgtg

SEQ ID NO: 82170 - DNA, 25 bp, Homo sapiens
tgggcctcagattaaagctactgtc

SEQ ID NO: 82171 - DNA, 25 bp, Homo sapiens
tctctgtctagggtcttccaaactc

SEQ ID NO: 82172 - DNA, 25 bp, Homo sapiens
agtggctcaggcaccattccctatc

SEQ ID NO: 82173 - DNA, 25 bp, Homo sapiens
acctctgggatctggctacttagca

SEQ ID NO: 82174 - DNA, 25 bp, Homo sapiens
ctggggaaactagtctgcacttaaa

SEQ ID NO: 82175 - DNA, 25 bp, Homo sapiens
accactatatgttctcaacagctga

SEQ ID NO: 82176 - DNA, 25 bp, Homo sapiens
ggaacatttactgagcccttacttg

SEQ ID NO: 82177 - DNA, 25 bp, Homo sapiens
cattaaaacatttcatcatggaata

SEQ ID NO: 82178 - DNA, 25 bp, Homo sapiens
ttgtgcagggcccaactatatccgg

SEQ ID NO: 82179 - DNA, 25 bp, Homo sapiens
tgtggctacccttcccaggagctta

SEQ ID NO: 82180 - DNA, 25 bp, Homo sapiens
ctctgtggcttagtgcaatctgtga

SEQ ID NO: 82181 - DNA, 25 bp, Homo sapiens
cgtataccattctctaatctagggc

SEQ ID NO: 82182 - DNA, 25 bp, Homo sapiens
gccacgcatctacaaagctctcttg

SEQ ID NO: 82183 - DNA, 25 bp, Homo sapiens
ccactgtattcgtagggagataata

SEQ ID NO: 82184 - DNA, 25 bp, Homo sapiens
cctaggtagccttggtgtttataac

SEQ ID NO: 82185 - DNA, 25 bp, Homo sapiens
gtccctcacgtggatgcaactgatt

SEQ ID NO: 82186 - DNA, 25 bp, Homo sapiens
atccagccatttgtctattgaggcc

SEQ ID NO: 82187 - DNA, 25 bp, Homo sapiens
tccctgttgaaaagaggccaatgta

SEQ ID NO: 82188 - DNA, 25 bp, Homo sapiens
ctggggagcagatgagccttgaaaa

SEQ ID NO: 82189 - DNA, 25 bp, Homo sapiens
cctatgccaggtttccaagaacaga

SEQ ID NO: 82190 - DNA, 25 bp, Homo sapiens
gagctcacctctgtatgtcatatca

SEQ ID NO: 82191 - DNA, 25 bp, Homo sapiens
ctctgatacggcaaatgcatgcttt

SEQ ID NO: 82192 - DNA, 25 bp, Homo sapiens
tgtgctcatgtacgccagaatttgg

SEQ ID NO: 82193 - DNA, 25 bp, Homo sapiens
gacaggcacacttctgaccaggtta

SEQ ID NO: 82194 - DNA, 25 bp, Homo sapiens
ccctgctggacgattgactttcttc

SEQ ID NO: 82195 - DNA, 25 bp, Homo sapiens
gtcccacaggcatgactcaggatta

SEQ ID NO: 82196 - DNA, 25 bp, Homo sapiens
acaccggagtttttcacaaggacca

SEQ ID NO: 82197 - DNA, 25 bp, Homo sapiens
tggaggggagctttctatttctacc

SEQ ID NO: 82198 - DNA, 25 bp, Homo sapiens
atgctgcctttactgatctttgcca

SEQ ID NO: 82199 - DNA, 25 bp, Homo sapiens
gcctgttcatagcttctggagtata

SEQ ID NO: 82200 - DNA, 25 bp, Homo sapiens
ctgctctggaactagcgaaacaatc

SEQ ID NO: 82201 - DNA, 25 bp, Homo sapiens
gtccacctccccttttacaaacaca

SEQ ID NO: 82202 - DNA, 25 bp, Homo sapiens
ggtaccatactaaggcagagcattt

SEQ ID NO: 82203 - DNA, 25 bp, Homo sapiens
tggagggcagctagttcatcatttc

SEQ ID NO: 82204 - DNA, 25 bp, Homo sapiens
tgttggcctcatgcaataaagctgc

SEQ ID NO: 82205 - DNA, 25 bp, Homo sapiens
gaggaccctctatggctttctagtg

SEQ ID NO: 82206 - DNA, 25 bp, Homo sapiens
gtttttaccaaatccatcagccaga

SEQ ID NO: 82207 - DNA, 25 bp, Homo sapiens
ccatttctcaaatatcactcatcag

SEQ ID NO: 82208 - DNA, 25 bp, Homo sapiens
ttagcatggcaagcaatacttttcc

SEQ ID NO: 82209 - DNA, 25 bp, Homo sapiens
ttaaataaatgcagagagttgataa

SEQ ID NO: 82210 - DNA, 25 bp, Homo sapiens
ccagcagaatctgagtaaggacatg

SEQ ID NO: 82211 - DNA, 25 bp, Homo sapiens
tctcagaattgtctcagagtgacca

SEQ ID NO: 82212 - DNA, 25 bp, Homo sapiens
ggcattctgcctctcctttgtctta

SEQ ID NO: 82213 - DNA, 25 bp, Homo sapiens
tgatgatccagcacccactagcttc

SEQ ID NO: 82214 - DNA, 25 bp, Homo sapiens
gtaagttcaggccaccaccaaattg

SEQ ID NO: 82215 - DNA, 25 bp, Homo sapiens
accatgccttggttgttaaagtcca

SEQ ID NO: 82216 - DNA, 25 bp, Homo sapiens
gccatgtcagggctcagacttccta

SEQ ID NO: 82217 - DNA, 25 bp, Homo sapiens
cagactgtttggcattcactcattc

SEQ ID NO: 82218 - DNA, 25 bp, Homo sapiens
tataacactttctgcatcaaactca

SEQ ID NO: 82219 - DNA, 25 bp, Homo sapiens
cggcctggcaatatgtaggatgtca

SEQ ID NO: 82220 - DNA, 25 bp, Homo sapiens
cacatgtgtgtccttggattgagtc

SEQ ID NO: 82221 - DNA, 25 bp, Homo sapiens
ctccctaggttactgcaatttagtg

SEQ ID NO: 82222 - DNA, 25 bp, Homo sapiens
ccaggcttaggcataggtatttcta

SEQ ID NO: 82223 - DNA, 25 bp, Homo sapiens
ttccctggttctgagctgctctcta

SEQ ID NO: 82224 - DNA, 25 bp, Homo sapiens
ttggcaactgtgcttaaacctcttg

SEQ ID NO: 82225 - DNA, 25 bp, Homo sapiens
cctcgctcagcccacaagtgaatta

SEQ ID NO: 82226 - DNA, 25 bp, Homo sapiens
tctgcacactgctggacaatttttg

SEQ ID NO: 82227 - DNA, 25 bp, Homo sapiens
atgtgagattcagccacttcttgtg

SEQ ID NO: 82228 - DNA, 25 bp, Homo sapiens
tggctccagctcacagaagaaaata

SEQ ID NO: 82229 - DNA, 25 bp, Homo sapiens
tcgtggccatcgtattcagaattgc

SEQ ID NO: 82230 - DNA, 25 bp, Homo sapiens
taaaataaagggttgtatttagaca

SEQ ID NO: 82231 - DNA, 25 bp, Homo sapiens
tccgggaggacttttcttgttcata

SEQ ID NO: 82232 - DNA, 25 bp, Homo sapiens
gacaaccttgttgagggacttactg

SEQ ID NO: 82233 - DNA, 25 bp, Homo sapiens
ggcctggcaaggttagtattttctc

SEQ ID NO: 82234 - DNA, 25 bp, Homo sapiens
tttgggcctcaaaagcattctagtc

SEQ ID NO: 82235 - DNA, 25 bp, Homo sapiens
agccagttgtgcatgctcctccatg

SEQ ID NO: 82236 - DNA, 25 bp, Homo sapiens
tgtttctcctgggactgccactaga

SEQ ID NO: 82237 - DNA, 25 bp, Homo sapiens
ttttctgtctatctgggtgccctca

SEQ ID NO: 82238 - DNA, 25 bp, Homo sapiens
tcaccagggaaaggccaggattctc

SEQ ID NO: 82239 - DNA, 25 bp, Homo sapiens
gtcttgcttttctccatattttgta

SEQ ID NO: 82240 - DNA, 25 bp, Homo sapiens
gaagtcctagtctattcatgtcatt

SEQ ID NO: 82241 - DNA, 25 bp, Homo sapiens
gtttctctcatcatccttcatgttt

SEQ ID NO: 82242 - DNA, 25 bp, Homo sapiens
tatactgcctccctccccaaactta

SEQ ID NO: 82243 - DNA, 25 bp, Homo sapiens
agaaaacgtactctccataggaaga

SEQ ID NO: 82244 - DNA, 25 bp, Homo sapiens
aataaatgactttataaagtctctg

SEQ ID NO: 82245 - DNA, 25 bp, Homo sapiens
cccactggaggctgagagatatttc

SEQ ID NO: 82246 - DNA, 25 bp, Homo sapiens
ggttccctaagaaaccctgtcccta

SEQ ID NO: 82247 - DNA, 25 bp, Homo sapiens
ttttttaagggtataaattacttct

SEQ ID NO: 82248 - DNA, 25 bp, Homo sapiens
ctgaatgatgtccaaagcctagaga

SEQ ID NO: 82249 - DNA, 25 bp, Homo sapiens
gtcatagaaggcttagaaagaactc

SEQ ID NO: 82250 - DNA, 25 bp, Homo sapiens
tccacaaactaagcaggcataatta

SEQ ID NO: 82251 - DNA, 25 bp, Homo sapiens
cagctgcaggtttgccataggaaga

SEQ ID NO: 82252 - DNA, 25 bp, Homo sapiens
tttcaaaaaaatataactgttagaa

SEQ ID NO: 82253 - DNA, 25 bp, Homo sapiens
cacgtctgtgctcttccttttcata

SEQ ID NO: 82254 - DNA, 25 bp, Homo sapiens
gtttaagaatcactgccctaaggta

SEQ ID NO: 82255 - DNA, 25 bp, Homo sapiens
tcagtaccctggagtgctctggata

SEQ ID NO: 82256 - DNA, 25 bp, Homo sapiens
ggcaatattatttggtgaggatatc

SEQ ID NO: 82257 - DNA, 25 bp, Homo sapiens
ggctatttttctacactagggaaca

SEQ ID NO: 82258 - DNA, 25 bp, Homo sapiens
tgacccttggggaatgtaatgaaca

SEQ ID NO: 82259 - DNA, 25 bp, Homo sapiens
ggcgtgacctaaggcaaactatttt

SEQ ID NO: 82260 - DNA, 25 bp, Homo sapiens
tgttgccctcttaatattttgctta

SEQ ID NO: 82261 - DNA, 25 bp, Homo sapiens
tttcttaaaaaaatcaatgtatatg

SEQ ID NO: 82262 - DNA, 25 bp, Homo sapiens
ttctgagttcagagaaaagcaatga

SEQ ID NO: 82263 - DNA, 25 bp, Homo sapiens
aaaaagaaaaaatggcaaaacggga

SEQ ID NO: 82264 - DNA, 25 bp, Homo sapiens
caatggggtccaaatgttctctagc

SEQ ID NO: 82265 - DNA, 25 bp, Homo sapiens
tttgctctcgctcttcccgtaaatg

SEQ ID NO: 82266 - DNA, 25 bp, Homo sapiens
caaagggactgtgtgaaaaaccatc

SEQ ID NO: 82267 - DNA, 25 bp, Homo sapiens
caagcctcccagtttgtcttcacta

SEQ ID NO: 82268 - DNA, 25 bp, Homo sapiens
gttacacagtgaatttgggccatcc

SEQ ID NO: 82269 - DNA, 25 bp, Homo sapiens
agggacgtgttaccaatctgagaca

SEQ ID NO: 82270 - DNA, 25 bp, Homo sapiens
tgaagacatgctagagaccacacag

SEQ ID NO: 82271 - DNA, 25 bp, Homo sapiens
ttgccacttgaactcttcctcattg

SEQ ID NO: 82272 - DNA, 25 bp, Homo sapiens
cagtggcagattaaccttccgttta

SEQ ID NO: 82273 - DNA, 25 bp, Homo sapiens
ggtcccctttacatacgcagcatta

SEQ ID NO: 82274 - DNA, 25 bp, Homo sapiens
ggcccaaggtgtcctgcaagctata

SEQ ID NO: 82275 - DNA, 25 bp, Homo sapiens
atactcccatttctaaacactaatt

SEQ ID NO: 82276 - DNA, 25 bp, Homo sapiens
ccagagagagctttttagagtaata

SEQ ID NO: 82277 - DNA, 25 bp, Homo sapiens
cccttctccctttaagatgcatgtg

SEQ ID NO: 82278 - DNA, 25 bp, Homo sapiens
ccagtggcttctttactcccatata

SEQ ID NO: 82279 - DNA, 25 bp, Homo sapiens
gtttaataaaatacttcctggcatc

SEQ ID NO: 82280 - DNA, 25 bp, Homo sapiens
tcccagtgactgaagcttatctttg

SEQ ID NO: 82281 - DNA, 25 bp, Homo sapiens
tcagtgctttgttcaaggtccaatg

SEQ ID NO: 82282 - DNA, 25 bp, Homo sapiens
gcagtgcagcaaacattcgtctatc

SEQ ID NO: 82283 - DNA, 25 bp, Homo sapiens
gcagactatgcatgctgttgttaga

SEQ ID NO: 82284 - DNA, 25 bp, Homo sapiens
gagagagcctatgggacaaacaatc

SEQ ID NO: 82285 - DNA, 25 bp, Homo sapiens
aggaaggaaggaaaatacaagtgta

SEQ ID NO: 82286 - DNA, 25 bp, Homo sapiens
tttcaaggtcttctagttctcagga

SEQ ID NO: 82287 - DNA, 25 bp, Homo sapiens
cagcgctccagtccaattctttaaa

SEQ ID NO: 82288 - DNA, 25 bp, Homo sapiens
ggggactcaaactacaatggccttc

SEQ ID NO: 82289 - DNA, 25 bp, Homo sapiens
agagcagtagccaccttttcaacac

SEQ ID NO: 82290 - DNA, 25 bp, Homo sapiens
ccctaggatagtttcatgtaccaag

SEQ ID NO: 82291 - DNA, 25 bp, Homo sapiens
gggatctaaaattctccatacgtta

SEQ ID NO: 82292 - DNA, 25 bp, Homo sapiens
acaggtggtggcttgcttcatcaaa

SEQ ID NO: 82293 - DNA, 25 bp, Homo sapiens
ccctcagcagcatatggaacttttc

SEQ ID NO: 82294 - DNA, 25 bp, Homo sapiens
attgtaggcagttactttgttgagg

SEQ ID NO: 82295 - DNA, 25 bp, Homo sapiens
gtgactgctactccaatgcatcatg

SEQ ID NO: 82296 - DNA, 25 bp, Homo sapiens
aaatgtttcattcagcccaggagtg

SEQ ID NO: 82297 - DNA, 25 bp, Homo sapiens
ctgattctcagtcgtattggctaac

SEQ ID NO: 82298 - DNA, 25 bp, Homo sapiens
aaatatgaatacaactaaaaatagg

SEQ ID NO: 82299 - DNA, 25 bp, Homo sapiens
acatatataaattatgtatgcaaac

SEQ ID NO: 82300 - DNA, 25 bp, Homo sapiens
tcttctctgtgatgttggccactca

SEQ ID NO: 82301 - DNA, 25 bp, Homo sapiens
tgcatttcagatggttcaaggagcc

SEQ ID NO: 82302 - DNA, 25 bp, Homo sapiens
taatattgaaaaaattcagtagagg

SEQ ID NO: 82303 - DNA, 25 bp, Homo sapiens
gacacagtgtccacaggtatatcta

SEQ ID NO: 82304 - DNA, 25 bp, Homo sapiens
ctgctgctctagctgacagatttta

SEQ ID NO: 82305 - DNA, 25 bp, Homo sapiens
ggaggccttcaactgttttcaaaca

SEQ ID NO: 82306 - DNA, 25 bp, Homo sapiens
cgggctctcttcaatgtctgtctta

SEQ ID NO: 82307 - DNA, 25 bp, Homo sapiens
acttctgtggaggtcttggctctca

SEQ ID NO: 82308 - DNA, 25 bp, Homo sapiens
tgatttccatgtgtaggctttaccc

SEQ ID NO: 82309 - DNA, 25 bp, Homo sapiens
caggatgttttctgcagagtgatca

SEQ ID NO: 82310 - DNA, 25 bp, Homo sapiens
ttcctctgctatgctggtgacatca

SEQ ID NO: 82311 - DNA, 25 bp, Homo sapiens
tagtttataaagcagatatattttt

SEQ ID NO: 82312 - DNA, 25 bp, Homo sapiens
tgtggacaggttaaaagtaatgagc

SEQ ID NO: 82313 - DNA, 25 bp, Homo sapiens
gcaggaccttggaaactctcccttt

SEQ ID NO: 82314 - DNA, 25 bp, Homo sapiens
ttcccgaaatctgctgtaaaagtga

SEQ ID NO: 82315 - DNA, 25 bp, Homo sapiens
gttacctagacagcccaagttcagc

SEQ ID NO: 82316 - DNA, 25 bp, Homo sapiens
ctgtaccctcaaggtagtgagtatg

SEQ ID NO: 82317 - DNA, 25 bp, Homo sapiens
aaaagtggcttttcctatcctaggg

SEQ ID NO: 82318 - DNA, 25 bp, Homo sapiens
gttgctgttctcgtttcatcctaaa

SEQ ID NO: 82319 - DNA, 25 bp, Homo sapiens
tgtccttactatggttcactgctca

SEQ ID NO: 82320 - DNA, 25 bp, Homo sapiens
tcttcctagaatccatcttagtttg

SEQ ID NO: 82321 - DNA, 25 bp, Homo sapiens
cttccatgacttgtaggaggctgta

SEQ ID NO: 82322 - DNA, 25 bp, Homo sapiens
tccatggtggctttcttcttctttt

SEQ ID NO: 82323 - DNA, 25 bp, Homo sapiens
tcagtaaagctacatttctaagaaa

SEQ ID NO: 82324 - DNA, 25 bp, Homo sapiens
tcctttaggttggagcttcatgacc

SEQ ID NO: 82325 - DNA, 25 bp, Homo sapiens
tgaacacctgtgtactcaccacttg

SEQ ID NO: 82326 - DNA, 25 bp, Homo sapiens
tctgaagctgtagccgtgcaatatg

SEQ ID NO: 82327 - DNA, 25 bp, Homo sapiens
cataataatacaaaagatatttctg

SEQ ID NO: 82328 - DNA, 25 bp, Homo sapiens
gtttcagacagaaggcccagtattc

SEQ ID NO: 82329 - DNA, 25 bp, Homo sapiens
ccaggtgctttgtcttagagccatc

SEQ ID NO: 82330 - DNA, 25 bp, Homo sapiens
gccgattggcaactcagatacgatg

SEQ ID NO: 82331 - DNA, 25 bp, Homo sapiens
tcaactcattttctgagctgagctg

SEQ ID NO: 82332 - DNA, 25 bp, Homo sapiens
cgagtagaccagatagccctctttt

SEQ ID NO: 82333 - DNA, 25 bp, Homo sapiens
aggatctcgccaccgcagaagttta

SEQ ID NO: 82334 - DNA, 25 bp, Homo sapiens
cctggacttactctactattgaaca

SEQ ID NO: 82335 - DNA, 25 bp, Homo sapiens
tcttcactatttgtataaaaacaga

SEQ ID NO: 82336 - DNA, 25 bp, Homo sapiens
gttcccatagtaaagtgtctgtgta

SEQ ID NO: 82337 - DNA, 25 bp, Homo sapiens
ggcctccaaaggcaaccctacttgt

SEQ ID NO: 82338 - DNA, 25 bp, Homo sapiens
actgaacacaaccactaattaaata

SEQ ID NO: 82339 - DNA, 25 bp, Homo sapiens
ttgcctcctagagagacagcattca

SEQ ID NO: 82340 - DNA, 25 bp, Homo sapiens
tactctcttaggtagggccagtgtc

SEQ ID NO: 82341 - DNA, 25 bp, Homo sapiens
ttcagctcagtaacccacagttgtg

SEQ ID NO: 82342 - DNA, 25 bp, Homo sapiens
gcatcacctgtccttcctagttaaa

SEQ ID NO: 82343 - DNA, 25 bp, Homo sapiens
ttaaggttttttaagcctgactttt

SEQ ID NO: 82344 - DNA, 25 bp, Homo sapiens
tggggtcaaataacaaaaggccttc

SEQ ID NO: 82345 - DNA, 25 bp, Homo sapiens
atatatattgcaatatactcctctg

SEQ ID NO: 82346 - DNA, 25 bp, Homo sapiens
cgctcaaggggtattcatttgcctc

SEQ ID NO: 82347 - DNA, 25 bp, Homo sapiens
tctttgtaggcagcacagccaggta

SEQ ID NO: 82348 - DNA, 25 bp, Homo sapiens
cctcccagggctattattcttcatg

SEQ ID NO: 82349 - DNA, 25 bp, Homo sapiens
gtgctgggactctcaaccaacaatg

SEQ ID NO: 82350 - DNA, 25 bp, Homo sapiens
tctgtggctaacaatattattcttg

SEQ ID NO: 82351 - DNA, 25 bp, Homo sapiens
ctttatattttgtaaaagagaaaca

SEQ ID NO: 82352 - DNA, 25 bp, Homo sapiens
ggggaagcacccataagtaatttca

SEQ ID NO: 82353 - DNA, 25 bp, Homo sapiens
gggtctatgtacatatgtgcatcta

SEQ ID NO: 82354 - DNA, 25 bp, Homo sapiens
ttgggagatcacactggcaattctg

SEQ ID NO: 82355 - DNA, 25 bp, Homo sapiens
caccagggtaaaaggagaaggccta

SEQ ID NO: 82356 - DNA, 25 bp, Homo sapiens
tgtttatttatatgtaaactatatg

SEQ ID NO: 82357 - DNA, 25 bp, Homo sapiens
aggtgctcttctgttgcccaaatga

SEQ ID NO: 82358 - DNA, 25 bp, Homo sapiens
ctactggccctatggaagtctttgc

SEQ ID NO: 82359 - DNA, 25 bp, Homo sapiens
gtactgcaagatgtttggaagcatc

SEQ ID NO: 82360 - DNA, 25 bp, Homo sapiens
ccatttgtgaaagaatatattatta

SEQ ID NO: 82361 - DNA, 25 bp, Homo sapiens
tgcatattgactcccaggtttttta

SEQ ID NO: 82362 - DNA, 25 bp, Homo sapiens
tgtgggcactagatcaggttcccta

SEQ ID NO: 82363 - DNA, 25 bp, Homo sapiens
gaagctaagcttcttgttttgtaga

SEQ ID NO: 82364 - DNA, 25 bp, Homo sapiens
aatccattggtatgaacttgtaata

SEQ ID NO: 82365 - DNA, 25 bp, Homo sapiens
cttccagttattctcagcaggggta

SEQ ID NO: 82366 - DNA, 25 bp, Homo sapiens
tgccacgtcaatctaccaaagtatg

SEQ ID NO: 82367 - DNA, 25 bp, Homo sapiens
taataaaatttaaaaaccaaagatg

SEQ ID NO: 82368 - DNA, 25 bp, Homo sapiens
ctgctctgcagcaatatattgaagt

SEQ ID NO: 82369 - DNA, 25 bp, Homo sapiens
actccccaaaatttattctcacaaa

SEQ ID NO: 82370 - DNA, 25 bp, Homo sapiens
gggctggcaccttattaagactatt

SEQ ID NO: 82371 - DNA, 25 bp, Homo sapiens
tggggatgtctccatattacaagcc

SEQ ID NO: 82372 - DNA, 25 bp, Homo sapiens
ctactatgaggaagtggcagaatgg

SEQ ID NO: 82373 - DNA, 25 bp, Homo sapiens
gtcagtgaaacatcctcagtcatca

SEQ ID NO: 82374 - DNA, 25 bp, Homo sapiens
agatttccattttacccagtgtatt

SEQ ID NO: 82375 - DNA, 25 bp, Homo sapiens
ggggctaacacccaaccaactgcta

SEQ ID NO: 82376 - DNA, 25 bp, Homo sapiens
aatgcataatagagtcattggtaat

SEQ ID NO: 82377 - DNA, 25 bp, Homo sapiens
cgctggtcctgttctctgaagcaca

SEQ ID NO: 82378 - DNA, 25 bp, Homo sapiens
cggcctcatcaagagagcagtttta

SEQ ID NO: 82379 - DNA, 25 bp, Homo sapiens
gggaagaaaaggacacaaatcattt

SEQ ID NO: 82380 - DNA, 25 bp, Homo sapiens
gaaatcaaagaaaaatgtatttcta

SEQ ID NO: 82381 - DNA, 25 bp, Homo sapiens
tgggaaactggaatattgtcttacc

SEQ ID NO: 82382 - DNA, 25 bp, Homo sapiens
ctcttgggtagagacaacttattta

SEQ ID NO: 82383 - DNA, 25 bp, Homo sapiens
agcaggttagtagcttgccaataaa

SEQ ID NO: 82384 - DNA, 25 bp, Homo sapiens
tgaagttttaatggctgttaaagtc

SEQ ID NO: 82385 - DNA, 25 bp, Homo sapiens
ccagcttcttgtgtaccttgacatg

SEQ ID NO: 82386 - DNA, 25 bp, Homo sapiens
ccacactttatagaactgcttgatc

SEQ ID NO: 82387 - DNA, 25 bp, Homo sapiens
aaaattgtatttttcttcttatttc

SEQ ID NO: 82388 - DNA, 25 bp, Homo sapiens
ttggtccaaaggatatactacttga

SEQ ID NO: 82389 - DNA, 25 bp, Homo sapiens
cctgctctcttgaaatcactgctga

SEQ ID NO: 82390 - DNA, 25 bp, Homo sapiens
tgccatgaagtgttaggtacaaccc

SEQ ID NO: 82391 - DNA, 25 bp, Homo sapiens
cactccttctgtgagcttacccata

SEQ ID NO: 82392 - DNA, 25 bp, Homo sapiens
cactttggactggagtggacacaga

SEQ ID NO: 82393 - DNA, 25 bp, Homo sapiens
gagggccacagctgtatctgaaaga

SEQ ID NO: 82394 - DNA, 25 bp, Homo sapiens
ctgaggctctgtcatccacggaatc

SEQ ID NO: 82395 - DNA, 25 bp, Homo sapiens
ggctgctgtgccctctttataaaag

SEQ ID NO: 82396 - DNA, 25 bp, Homo sapiens
tgggtagtgccatctcatcatgata

SEQ ID NO: 82397 - DNA, 25 bp, Homo sapiens
ctatccttcagaaataaataagaaa

SEQ ID NO: 82398 - DNA, 25 bp, Homo sapiens
caaagtatcacattgttcaaagcgt

SEQ ID NO: 82399 - DNA, 25 bp, Homo sapiens
aaactgaaagaatgaggattatgct

SEQ ID NO: 82400 - DNA, 25 bp, Homo sapiens
gcaatcctataaaagtgatcataaa

SEQ ID NO: 82401 - DNA, 25 bp, Homo sapiens
gtgcagtttcagatccagaggcttt

SEQ ID NO: 82402 - DNA, 25 bp, Homo sapiens
gtctgagtcataccaattggccttg

SEQ ID NO: 82403 - DNA, 25 bp, Homo sapiens
ggcaccatagccatctaccttattg

SEQ ID NO: 82404 - DNA, 25 bp, Homo sapiens
ggggtttattttcgcccatcattaa

SEQ ID NO: 82405 - DNA, 25 bp, Homo sapiens
agcaactagcactcctgaatgaagg

SEQ ID NO: 82406 - DNA, 25 bp, Homo sapiens
ttggatgccaaataccatgcttgtc

SEQ ID NO: 82407 - DNA, 25 bp, Homo sapiens
caatgactctgtttctcaaggtgga

SEQ ID NO: 82408 - DNA, 25 bp, Homo sapiens
tgttcctcatgcctccaagcagttg

SEQ ID NO: 82409 - DNA, 25 bp, Homo sapiens
gttcttatcatgttacactttgtat

SEQ ID NO: 82410 - DNA, 25 bp, Homo sapiens
tcgttcgcgggaaaagatgctttta

SEQ ID NO: 82411 - DNA, 25 bp, Homo sapiens
aagttggcatccagctttattcagc

SEQ ID NO: 82412 - DNA, 25 bp, Homo sapiens
tcgggactagcatcctggacttttc

SEQ ID NO: 82413 - DNA, 25 bp, Homo sapiens
tgtcagaagtgggatgtagaaaaca

SEQ ID NO: 82414 - DNA, 25 bp, Homo sapiens
cttaattgccttcttaactataaaa

SEQ ID NO: 82415 - DNA, 25 bp, Homo sapiens
tgaggacttgcctttcagtttagaa

SEQ ID NO: 82416 - DNA, 25 bp, Homo sapiens
tgggtgggaagatccctccctatta

SEQ ID NO: 82417 - DNA, 25 bp, Homo sapiens
ggtagctgttctcttcaagcacata

SEQ ID NO: 82418 - DNA, 25 bp, Homo sapiens
ggccagccctggactctaagacatc

SEQ ID NO: 82419 - DNA, 25 bp, Homo sapiens
ctattagtggtaattgagtaggacc

SEQ ID NO: 82420 - DNA, 25 bp, Homo sapiens
aataaaaagagttcaatcaggcaaa

SEQ ID NO: 82421 - DNA, 25 bp, Homo sapiens
acagttagcttgactggggcctata

SEQ ID NO: 82422 - DNA, 25 bp, Homo sapiens
gattggcctttcctgtcatggtgta

SEQ ID NO: 82423 - DNA, 25 bp, Homo sapiens
gtcatggtgtcgcaaagatctctta

SEQ ID NO: 82424 - DNA, 25 bp, Homo sapiens
aactttctcaatacatttactcttt

SEQ ID NO: 82425 - DNA, 25 bp, Homo sapiens
ttctctgcctcagcaggatgtcttt

SEQ ID NO: 82426 - DNA, 25 bp, Homo sapiens
cccatgcttggaaatcctgttttta

SEQ ID NO: 82427 - DNA, 25 bp, Homo sapiens
gtgctgcatgtcctctagtaacctc

SEQ ID NO: 82428 - DNA, 25 bp, Homo sapiens
ctcttccggtgataagctgacattt

SEQ ID NO: 82429 - DNA, 25 bp, Homo sapiens
ttgcaccctgtggagaaatatagtc

SEQ ID NO: 82430 - DNA, 25 bp, Homo sapiens
ccctggtctcatatagcttacattc

SEQ ID NO: 82431 - DNA, 25 bp, Homo sapiens
tactagttagacatatggtcatgtt

SEQ ID NO: 82432 - DNA, 25 bp, Homo sapiens
ttatgccaaatttgtgtaaacatat

SEQ ID NO: 82433 - DNA, 25 bp, Homo sapiens
ggccactttataacctctgagaatg

SEQ ID NO: 82434 - DNA, 25 bp, Homo sapiens
tgtgatctcaaaagtagcctgtgtg

SEQ ID NO: 82435 - DNA, 25 bp, Homo sapiens
tgggagataataaacacagcataca

SEQ ID NO: 82436 - DNA, 25 bp, Homo sapiens
atctcagggagcctgtagggttgat

SEQ ID NO: 82437 - DNA, 25 bp, Homo sapiens
tggccttgaattcagtaaaccgttg

SEQ ID NO: 82438 - DNA, 25 bp, Homo sapiens
attgagaccgtgctacttgactttc

SEQ ID NO: 82439 - DNA, 25 bp, Homo sapiens
ccaggctgctggatcaatttcataa

SEQ ID NO: 82440 - DNA, 25 bp, Homo sapiens
agtgctcctttctttcgttcatgtt

SEQ ID NO: 82441 - DNA, 25 bp, Homo sapiens
gtagatcccgagaactatagtcttc

SEQ ID NO: 82442 - DNA, 25 bp, Homo sapiens
gtgaggccctctacagttaacatta

SEQ ID NO: 82443 - DNA, 25 bp, Homo sapiens
atggtatcctgtcctttgagcaagc

SEQ ID NO: 82444 - DNA, 25 bp, Homo sapiens
gcatctcctacaaagcaatcagtga

SEQ ID NO: 82445 - DNA, 25 bp, Homo sapiens
aactattttttaaaatgaacaattc

SEQ ID NO: 82446 - DNA, 25 bp, Homo sapiens
gatggcctgaaataaactcctcttg

SEQ ID NO: 82447 - DNA, 25 bp, Homo sapiens
ttaaggcctccacaacaacctggga

SEQ ID NO: 82448 - DNA, 25 bp, Homo sapiens
tgctctgtggctcttctctctttaa

SEQ ID NO: 82449 - DNA, 25 bp, Homo sapiens
tgagccactcactactatacacatg

SEQ ID NO: 82450 - DNA, 25 bp, Homo sapiens
tgctgcttgtagatggcaatgtgca

SEQ ID NO: 82451 - DNA, 25 bp, Homo sapiens
aaacactgcaaaaggtaatagtgct

SEQ ID NO: 82452 - DNA, 25 bp, Homo sapiens
cagctggctctttccctgtgaaata

SEQ ID NO: 82453 - DNA, 25 bp, Homo sapiens
gatgttatctgtctcctttcaaagg

SEQ ID NO: 82454 - DNA, 25 bp, Homo sapiens
agccaggctcagaaagcatttttcc

SEQ ID NO: 82455 - DNA, 25 bp, Homo sapiens
ttccgattggctcctgacagtaacg

SEQ ID NO: 82456 - DNA, 25 bp, Homo sapiens
tgagcctgcaggtagctacaacatg

SEQ ID NO: 82457 - DNA, 25 bp, Homo sapiens
ttagctcaaagtctgcctgacgggg

SEQ ID NO: 82458 - DNA, 25 bp, Homo sapiens
tgggaactaccctcattggaagaca

SEQ ID NO: 82459 - DNA, 25 bp, Homo sapiens
ctaagacgatttgcaagctaccatc

SEQ ID NO: 82460 - DNA, 25 bp, Homo sapiens
ctcggttacaatcagtcttcatgta

SEQ ID NO: 82461 - DNA, 25 bp, Homo sapiens
ggcatggtacatgttttctcaagta

SEQ ID NO: 82462 - DNA, 25 bp, Homo sapiens
actaataaaattattggcatctgtt

SEQ ID NO: 82463 - DNA, 25 bp, Homo sapiens
gtatgccctctgtcattgctgaaga

SEQ ID NO: 82464 - DNA, 25 bp, Homo sapiens
gcatctgaaagaggccagtgacttc

SEQ ID NO: 82465 - DNA, 25 bp, Homo sapiens
gccagtggcaggacttgacaaaata

SEQ ID NO: 82466 - DNA, 25 bp, Homo sapiens
tgcatgactgactgtacctgagatc

SEQ ID NO: 82467 - DNA, 25 bp, Homo sapiens
tccaggcatctcacagctatttttc

SEQ ID NO: 82468 - DNA, 25 bp, Homo sapiens
ggtctctccaaaacaacgcatgatg

SEQ ID NO: 82469 - DNA, 25 bp, Homo sapiens
cccatgctgaggtcacattccaatg

SEQ ID NO: 82470 - DNA, 25 bp, Homo sapiens
gtcaaggaagctctattacagttcc

SEQ ID NO: 82471 - DNA, 25 bp, Homo sapiens
atacaaataataaaatcaaactcca

SEQ ID NO: 82472 - DNA, 25 bp, Homo sapiens
ggctactctcttcccttgtgtcatg

SEQ ID NO: 82473 - DNA, 25 bp, Homo sapiens
ggtgcatatagctcgaccaaaactg

SEQ ID NO: 82474 - DNA, 25 bp, Homo sapiens
ctggtctgtcagtcaaaagtgtgta

SEQ ID NO: 82475 - DNA, 25 bp, Homo sapiens
ctgggcttcctaggtaaatcactta

SEQ ID NO: 82476 - DNA, 25 bp, Homo sapiens
acaccagagggtggaagtctattca

SEQ ID NO: 82477 - DNA, 25 bp, Homo sapiens
ttagcacacagttcctggcacaata

SEQ ID NO: 82478 - DNA, 25 bp, Homo sapiens
aagttattagatattgtggccctgc

SEQ ID NO: 82479 - DNA, 25 bp, Homo sapiens
taaaatgcctggagaaaaaaggaat

SEQ ID NO: 82480 - DNA, 25 bp, Homo sapiens
atttgtcttttccaccacagtatga

SEQ ID NO: 82481 - DNA, 25 bp, Homo sapiens
gcttttaagaaagtttagtgctcaa

SEQ ID NO: 82482 - DNA, 25 bp, Homo sapiens
tgttgatcttttatattattttcat

SEQ ID NO: 82483 - DNA, 25 bp, Homo sapiens
tgccctcaggactcagaagataatg

SEQ ID NO: 82484 - DNA, 25 bp, Homo sapiens
gtctcagatttggccagaaccttgt

SEQ ID NO: 82485 - DNA, 25 bp, Homo sapiens
ctggtgcaacttaaatcctacttgt

SEQ ID NO: 82486 - DNA, 25 bp, Homo sapiens
catgcttttggagcagcagtcttga

SEQ ID NO: 82487 - DNA, 25 bp, Homo sapiens
agacacatgtcttcacagtagttca

SEQ ID NO: 82488 - DNA, 25 bp, Homo sapiens
gggagactaccaccaacaatagatg

SEQ ID NO: 82489 - DNA, 25 bp, Homo sapiens
cccacattctatgactgctgttgta

SEQ ID NO: 82490 - DNA, 25 bp, Homo sapiens
cctgagtaacaccaaatgcatgctg

SEQ ID NO: 82491 - DNA, 25 bp, Homo sapiens
tggctcctgaggtcatcggatttta

SEQ ID NO: 82492 - DNA, 25 bp, Homo sapiens
tggggcattttcttacagttcattg

SEQ ID NO: 82493 - DNA, 25 bp, Homo sapiens
agccatggccttctggtaagtctca

SEQ ID NO: 82494 - DNA, 25 bp, Homo sapiens
ccacctactgtatgttgcagccata

SEQ ID NO: 82495 - DNA, 25 bp, Homo sapiens
gaggttgctccatgtttcaaatgcc

SEQ ID NO: 82496 - DNA, 25 bp, Homo sapiens
gtcatgtgaatgttgaaattatctg

SEQ ID NO: 82497 - DNA, 25 bp, Homo sapiens
tccagctctgctttgtgcagaatta

SEQ ID NO: 82498 - DNA, 25 bp, Homo sapiens
cccttgcaacaagcatgagtcctga

SEQ ID NO: 82499 - DNA, 25 bp, Homo sapiens
tgcagcctccttggatgtaagttta

SEQ ID NO: 82500 - DNA, 25 bp, Homo sapiens
attgaggagtagttgacacattttc

SEQ ID NO: 82501 - DNA, 25 bp, Homo sapiens
ctaaataacttattgtctgatattg

SEQ ID NO: 82502 - DNA, 25 bp, Homo sapiens
ttaggcaattagactactgagtgac

SEQ ID NO: 82503 - DNA, 25 bp, Homo sapiens
gagtggtaatattaggagtgccttg

SEQ ID NO: 82504 - DNA, 25 bp, Homo sapiens
ccttatataatgtatgtaaatgtta

SEQ ID NO: 82505 - DNA, 25 bp, Homo sapiens
ataaggtagtcaaagccagtatgta

SEQ ID NO: 82506 - DNA, 25 bp, Homo sapiens
tgcccagttctgtctgacctcaaat

SEQ ID NO: 82507 - DNA, 25 bp, Homo sapiens
gttgttttcatgctcagccacttag

SEQ ID NO: 82508 - DNA, 25 bp, Homo sapiens
tcacgctgaaggacagtgcaatctt

SEQ ID NO: 82509 - DNA, 25 bp, Homo sapiens
aagcctcaactcttctgctcgtatg

SEQ ID NO: 82510 - DNA, 25 bp, Homo sapiens
tgtgtgtgcgcctatgtgaaatgaa

SEQ ID NO: 82511 - DNA, 25 bp, Homo sapiens
aaacaaaaaatcctaggacagagat

SEQ ID NO: 82512 - DNA, 25 bp, Homo sapiens
aatgtgtcctgagaaaaaaaaatgt

SEQ ID NO: 82513 - DNA, 25 bp, Homo sapiens
tgggcttgtccacactgaatctttt

SEQ ID NO: 82514 - DNA, 25 bp, Homo sapiens
gaggctttcatgagcagattattcc

SEQ ID NO: 82515 - DNA, 25 bp, Homo sapiens
ggcctgatggctgtctcattgaata

SEQ ID NO: 82516 - DNA, 25 bp, Homo sapiens
catggattaagaatgctggcctata

SEQ ID NO: 82517 - DNA, 25 bp, Homo sapiens
ctagctctgaagtatatcatggtcc

SEQ ID NO: 82518 - DNA, 25 bp, Homo sapiens
ctcttttctgtgtagggtattgaca

SEQ ID NO: 82519 - DNA, 25 bp, Homo sapiens
tatggccacttctctagcctggagc

SEQ ID NO: 82520 - DNA, 25 bp, Homo sapiens
ataaataaatagaacttgaagttta

SEQ ID NO: 82521 - DNA, 25 bp, Homo sapiens
ccctggattcagtgcctgatagtta

SEQ ID NO: 82522 - DNA, 25 bp, Homo sapiens
cactggaacaaaaatttagtataat

SEQ ID NO: 82523 - DNA, 25 bp, Homo sapiens
cctgggacactgaatcctctgtatc

SEQ ID NO: 82524 - DNA, 25 bp, Homo sapiens
tgaaggctataaggtgctacaactc

SEQ ID NO: 82525 - DNA, 25 bp, Homo sapiens
gaggctgtgactctgtgaatgtaca

SEQ ID NO: 82526 - DNA, 25 bp, Homo sapiens
tgcttctggcattgtattactgtag

SEQ ID NO: 82527 - DNA, 25 bp, Homo sapiens
ataaatagagtttttgtaaagaata

SEQ ID NO: 82528 - DNA, 25 bp, Homo sapiens
ctctggctctagtcaaaatgccttg

SEQ ID NO: 82529 - DNA, 25 bp, Homo sapiens
gctgtcttcccaggcactcataatg

SEQ ID NO: 82530 - DNA, 25 bp, Homo sapiens
ctgattgagtttatttaattttcaa

SEQ ID NO: 82531 - DNA, 25 bp, Homo sapiens
ttctggcaaaactaggaaactactg

SEQ ID NO: 82532 - DNA, 25 bp, Homo sapiens
tcatggtggacagagaatattattc

SEQ ID NO: 82533 - DNA, 25 bp, Homo sapiens
aaaaaaatagcgagggtaacaggag

SEQ ID NO: 82534 - DNA, 25 bp, Homo sapiens
ttagtgagccaccaacgtaacatta

SEQ ID NO: 82535 - DNA, 25 bp, Homo sapiens
ttcccacagtcccagtagatttttg

SEQ ID NO: 82536 - DNA, 25 bp, Homo sapiens
catatcttggggactttgacggctc

SEQ ID NO: 82537 - DNA, 25 bp, Homo sapiens
tgaggaccggacagacatagcattg

SEQ ID NO: 82538 - DNA, 25 bp, Homo sapiens
ggcaggctttttcctcccagtattg

SEQ ID NO: 82539 - DNA, 25 bp, Homo sapiens
actggaccagataagcggaatgaca

SEQ ID NO: 82540 - DNA, 25 bp, Homo sapiens
acagtttctttatccacttgttgtg

SEQ ID NO: 82541 - DNA, 25 bp, Homo sapiens
taacaggtatactggatacacagcc

SEQ ID NO: 82542 - DNA, 25 bp, Homo sapiens
actaactttaggatattatttgcca

SEQ ID NO: 82543 - DNA, 25 bp, Homo sapiens
ctctctcagtgtggggtgaaagtta

SEQ ID NO: 82544 - DNA, 25 bp, Homo sapiens
cctggccattgtctctacctgaatg

SEQ ID NO: 82545 - DNA, 25 bp, Homo sapiens
ccagacactacactgtgcagactta

SEQ ID NO: 82546 - DNA, 25 bp, Homo sapiens
cctagctgccatatattgttttttc

SEQ ID NO: 82547 - DNA, 25 bp, Homo sapiens
ccaaagattatctctccaaggaata

SEQ ID NO: 82548 - DNA, 25 bp, Homo sapiens
cagaatttcactagctggggtaata

SEQ ID NO: 82549 - DNA, 25 bp, Homo sapiens
agccaaagttgggtttcagtactcc

SEQ ID NO: 82550 - DNA, 25 bp, Homo sapiens
agtctatatcttctacatcttgtgc

SEQ ID NO: 82551 - DNA, 25 bp, Homo sapiens
gataggcatatatttctttaatgtg

SEQ ID NO: 82552 - DNA, 25 bp, Homo sapiens
ccctgagaaactccgtggggcattc

SEQ ID NO: 82553 - DNA, 25 bp, Homo sapiens
ggcaccattgcgctggctgaaaata

SEQ ID NO: 82554 - DNA, 25 bp, Homo sapiens
gctttaggccagcttccattgtcta

SEQ ID NO: 82555 - DNA, 25 bp, Homo sapiens
caaactagatgatctttaagggatt

SEQ ID NO: 82556 - DNA, 25 bp, Homo sapiens
ggggaaagtccatgcccttatatcg

SEQ ID NO: 82557 - DNA, 25 bp, Homo sapiens
ctctactgctctgctggcctgaata

SEQ ID NO: 82558 - DNA, 25 bp, Homo sapiens
ggcccagcatcaaacagcagcaatt

SEQ ID NO: 82559 - DNA, 25 bp, Homo sapiens
catgagtggcactaagcattgtacc

SEQ ID NO: 82560 - DNA, 25 bp, Homo sapiens
tgccagcctgcccaacaagttctag

SEQ ID NO: 82561 - DNA, 25 bp, Homo sapiens
ggaggccaatatgtcagcaaaactg

SEQ ID NO: 82562 - DNA, 25 bp, Homo sapiens
cctgcacagagctatccagttgctg

SEQ ID NO: 82563 - DNA, 25 bp, Homo sapiens
tttccattcttaactatttagcttg

SEQ ID NO: 82564 - DNA, 25 bp, Homo sapiens
gggtcgtttcctgtgagctatttca

SEQ ID NO: 82565 - DNA, 25 bp, Homo sapiens
ggtacatggtactcttcatctctga

SEQ ID NO: 82566 - DNA, 25 bp, Homo sapiens
gtagtgcttctctgcctgatcaatc

SEQ ID NO: 82567 - DNA, 25 bp, Homo sapiens
gaggctgctccttcaattgtccatt

SEQ ID NO: 82568 - DNA, 25 bp, Homo sapiens
ctggttaagtgtgaacagcaggtca

SEQ ID NO: 82569 - DNA, 25 bp, Homo sapiens
cactcaggtagactttttgcaaaga

SEQ ID NO: 82570 - DNA, 25 bp, Homo sapiens
gaatgctctcaagaaacaggggact

SEQ ID NO: 82571 - DNA, 25 bp, Homo sapiens
aaaaaaagaaacagggtactcagta

SEQ ID NO: 82572 - DNA, 25 bp, Homo sapiens
gcgatacttcctaagtggggcctca

SEQ ID NO: 82573 - DNA, 25 bp, Homo sapiens
gcctggccttggttcttgattccta

SEQ ID NO: 82574 - DNA, 25 bp, Homo sapiens
ccctccatgcaaagggcaaactgta

SEQ ID NO: 82575 - DNA, 25 bp, Homo sapiens
ctgggcacacattttatgtcatgga

SEQ ID NO: 82576 - DNA, 25 bp, Homo sapiens
cctcggtctagtcatcggcatattc

SEQ ID NO: 82577 - DNA, 25 bp, Homo sapiens
ctctgctaaagcaaggaggccttca

SEQ ID NO: 82578 - DNA, 25 bp, Homo sapiens
ctctggtaagcactcctggaattaa

SEQ ID NO: 82579 - DNA, 25 bp, Homo sapiens
ctcctcataaggtgtgccaaaatca

SEQ ID NO: 82580 - DNA, 25 bp, Homo sapiens
tagtaccagagatgcccttatattg

SEQ ID NO: 82581 - DNA, 25 bp, Homo sapiens
catgcgcacatgcactcacatagta

SEQ ID NO: 82582 - DNA, 25 bp, Homo sapiens
tgtctattcttcagttgcttgtccc

SEQ ID NO: 82583 - DNA, 25 bp, Homo sapiens
gataaactagcatttcctatgaagt

SEQ ID NO: 82584 - DNA, 25 bp, Homo sapiens
tacagaaaaaacaataagaaagctt

SEQ ID NO: 82585 - DNA, 25 bp, Homo sapiens
ccctgtaagcaaaactagtcagatc

SEQ ID NO: 82586 - DNA, 25 bp, Homo sapiens
ataattaaccacattgactgaattc

SEQ ID NO: 82587 - DNA, 25 bp, Homo sapiens
aaaaagacagaaaacataatctcaa

SEQ ID NO: 82588 - DNA, 25 bp, Homo sapiens
tttgagccatgaatacagcccttga

SEQ ID NO: 82589 - DNA, 25 bp, Homo sapiens
cactgcccggatattggactttctc

SEQ ID NO: 82590 - DNA, 25 bp, Homo sapiens
tctctattgttcactgggttccata

SEQ ID NO: 82591 - DNA, 25 bp, Homo sapiens
tccaggatttcactctgcaagtgta

SEQ ID NO: 82592 - DNA, 25 bp, Homo sapiens
cccgctctgtgctcatgtttctttc

SEQ ID NO: 82593 - DNA, 25 bp, Homo sapiens
gttctcacctccttccaggtacata

SEQ ID NO: 82594 - DNA, 25 bp, Homo sapiens
gcaatgtcctaccttccgttggata

SEQ ID NO: 82595 - DNA, 25 bp, Homo sapiens
tgtccaacactgaatccttagcttg

SEQ ID NO: 82596 - DNA, 25 bp, Homo sapiens
ccttggcaggtgtggaaatttcttt

SEQ ID NO: 82597 - DNA, 25 bp, Homo sapiens
ggcctatgacaggtttgttgccatc

SEQ ID NO: 82598 - DNA, 25 bp, Homo sapiens
tggctgcctgcagaaagggaaactg

SEQ ID NO: 82599 - DNA, 25 bp, Homo sapiens
ggacctccctgctggacacaacttg

SEQ ID NO: 82600 - DNA, 25 bp, Homo sapiens
gttgtacaagcatctctatcatttt

SEQ ID NO: 82601 - DNA, 25 bp, Homo sapiens
tctgtagtatatataaagaaaatgc

SEQ ID NO: 82602 - DNA, 25 bp, Homo sapiens
cctctgatgtccagggtttgcatta

SEQ ID NO: 82603 - DNA, 25 bp, Homo sapiens
tgagacatgctgctctaagacaatc

SEQ ID NO: 82604 - DNA, 25 bp, Homo sapiens
tccatgctgctgtgtgaatttctcc

SEQ ID NO: 82605 - DNA, 25 bp, Homo sapiens
tggcccttgacaacaactgaagatg

SEQ ID NO: 82606 - DNA, 25 bp, Homo sapiens
ccatgttggtttcccaggccattta

SEQ ID NO: 82607 - DNA, 25 bp, Homo sapiens
cagaccgtatgctactcctagggga

SEQ ID NO: 82608 - DNA, 25 bp, Homo sapiens
tctggcaaatggctgtcactgtgtc

SEQ ID NO: 82609 - DNA, 25 bp, Homo sapiens
gcaggctccttttctttctctaaga

SEQ ID NO: 82610 - DNA, 25 bp, Homo sapiens
cacgagtttcagtggtaatcccaaa

SEQ ID NO: 82611 - DNA, 25 bp, Homo sapiens
aggctctctagctctggtcaaatta

SEQ ID NO: 82612 - DNA, 25 bp, Homo sapiens
tttgcaaaaatcaggggcttacagc

SEQ ID NO: 82613 - DNA, 25 bp, Homo sapiens
ggtgtcgccaactgcaaaatgcttc

SEQ ID NO: 82614 - DNA, 25 bp, Homo sapiens
ttctgtcagccgaagatagatgtca

SEQ ID NO: 82615 - DNA, 25 bp, Homo sapiens
cacacacctctttctggggatgaca

SEQ ID NO: 82616 - DNA, 25 bp, Homo sapiens
agcctatcagggagagccctttctc

SEQ ID NO: 82617 - DNA, 25 bp, Homo sapiens
gattctgcctgacgctccttcatta

SEQ ID NO: 82618 - DNA, 25 bp, Homo sapiens
ccacactcatgtcctagcgggtata

SEQ ID NO: 82619 - DNA, 25 bp, Homo sapiens
gcttcagggataaggcaatctcacc

SEQ ID NO: 82620 - DNA, 25 bp, Homo sapiens
ttgctgcttcccactgttaccttga

SEQ ID NO: 82621 - DNA, 25 bp, Homo sapiens
ggggcatgccatggagttcattttc

SEQ ID NO: 82622 - DNA, 25 bp, Homo sapiens
ggacaactactgaagcaagaccctg

SEQ ID NO: 82623 - DNA, 25 bp, Homo sapiens
tggattccaatgtcccaggggagca

SEQ ID NO: 82624 - DNA, 25 bp, Homo sapiens
agctggccctaggttcacaccaatg

SEQ ID NO: 82625 - DNA, 25 bp, Homo sapiens
aagcagcatgtttgaggttctctcc

SEQ ID NO: 82626 - DNA, 25 bp, Homo sapiens
gccctttttgttttgctgaagtcca

SEQ ID NO: 82627 - DNA, 25 bp, Homo sapiens
actctgggataaggtctctgtgacg

SEQ ID NO: 82628 - DNA, 25 bp, Homo sapiens
gtatatgtcccttttggttggctcc

SEQ ID NO: 82629 - DNA, 25 bp, Homo sapiens
gcctcctggttgcactagtctctta

SEQ ID NO: 82630 - DNA, 25 bp, Homo sapiens
tttcgctaaggctaaggtcaagtcc

SEQ ID NO: 82631 - DNA, 25 bp, Homo sapiens
ggccacttgatatagcaccactttt

SEQ ID NO: 82632 - DNA, 25 bp, Homo sapiens
tccagcacatgaaggtactattttc

SEQ ID NO: 82633 - DNA, 25 bp, Homo sapiens
ccaacctggcaaattcttatactgt

SEQ ID NO: 82634 - DNA, 25 bp, Homo sapiens
cttcgtagagtttggctgcaacata

SEQ ID NO: 82635 - DNA, 25 bp, Homo sapiens
ctagcagatgttatgagcccacagt

SEQ ID NO: 82636 - DNA, 25 bp, Homo sapiens
tacagtgctgcttcccaagtctaac

SEQ ID NO: 82637 - DNA, 25 bp, Homo sapiens
gggtgtcatcatcattctcggaagc

SEQ ID NO: 82638 - DNA, 25 bp, Homo sapiens
caccctgttcctgctgctgtctgag

SEQ ID NO: 82639 - DNA, 25 bp, Homo sapiens
gtgttgtcaccagatccgatttgta

SEQ ID NO: 82640 - DNA, 25 bp, Homo sapiens
gacttgtgtatctcttgtagtagct

SEQ ID NO: 82641 - DNA, 25 bp, Homo sapiens
ggtcaagtccctctggcacatattt

SEQ ID NO: 82642 - DNA, 25 bp, Homo sapiens
gtttctcaaccatgtgatatccagg

SEQ ID NO: 82643 - DNA, 25 bp, Homo sapiens
cacagaaattctgagtggtttgcac

SEQ ID NO: 82644 - DNA, 25 bp, Homo sapiens
ataagttgatttatttctttaaata

SEQ ID NO: 82645 - DNA, 25 bp, Homo sapiens
tcctcgtatagaccaatgcctgatg

SEQ ID NO: 82646 - DNA, 25 bp, Homo sapiens
cacattcatttagcatacttaactg

SEQ ID NO: 82647 - DNA, 25 bp, Homo sapiens
aaaaggaaagtcacaagacagacct

SEQ ID NO: 82648 - DNA, 25 bp, Homo sapiens
ttttaaggaacaatacctattctag

SEQ ID NO: 82649 - DNA, 25 bp, Homo sapiens
tataaatatgtaaacaatatggttc

SEQ ID NO: 82650 - DNA, 25 bp, Homo sapiens
tggcctctgcgatgcagcttctata

SEQ ID NO: 82651 - DNA, 25 bp, Homo sapiens
gagctcatgggtcatatcctctatg

SEQ ID NO: 82652 - DNA, 25 bp, Homo sapiens
ctctggtggtctctctgtgacatta

SEQ ID NO: 82653 - DNA, 25 bp, Homo sapiens
ggcaagctcatgctccacagttgtg

SEQ ID NO: 82654 - DNA, 25 bp, Homo sapiens
cctggcatgtcttcccaatggcaaa

SEQ ID NO: 82655 - DNA, 25 bp, Homo sapiens
tgttaaggcctatctcaaccagtgc

SEQ ID NO: 82656 - DNA, 25 bp, Homo sapiens
tccgcagtgggttttggaacacaca

SEQ ID NO: 82657 - DNA, 25 bp, Homo sapiens
atccctggtttcatcctgtcattgg

SEQ ID NO: 82658 - DNA, 25 bp, Homo sapiens
aatcccagtggtctctcgcatgctc

SEQ ID NO: 82659 - DNA, 25 bp, Homo sapiens
ctgggctttccatagcacaagtgca

SEQ ID NO: 82660 - DNA, 25 bp, Homo sapiens
agatggacctaggaaagagaaatac

SEQ ID NO: 82661 - DNA, 25 bp, Homo sapiens
catggtcacttgagaaacgcctttc

SEQ ID NO: 82662 - DNA, 25 bp, Homo sapiens
gaatatcctcacttggccacttgag

SEQ ID NO: 82663 - DNA, 25 bp, Homo sapiens
taagccctgcctagctctgacaatg

SEQ ID NO: 82664 - DNA, 25 bp, Homo sapiens
catgaaacttgaccttgaaagttat

SEQ ID NO: 82665 - DNA, 25 bp, Homo sapiens
cctaatgactttttaatgatggccc

SEQ ID NO: 82666 - DNA, 25 bp, Homo sapiens
aggctgatatattttactgataatt

SEQ ID NO: 82667 - DNA, 25 bp, Homo sapiens
tcagtgcttattatggcatggtcca

SEQ ID NO: 82668 - DNA, 25 bp, Homo sapiens
tgaggtccacagcaagcatacatta

SEQ ID NO: 82669 - DNA, 25 bp, Homo sapiens
ggggcccttttaattggacttagca

SEQ ID NO: 82670 - DNA, 25 bp, Homo sapiens
tggggctccaagctaggtcttcttg

SEQ ID NO: 82671 - DNA, 25 bp, Homo sapiens
ccatgcaccctcgtcaagaatctta

SEQ ID NO: 82672 - DNA, 25 bp, Homo sapiens
ctatgccctcgaaaacattgcttta

SEQ ID NO: 82673 - DNA, 25 bp, Homo sapiens
ggtctgagaccagcaacttttctag

SEQ ID NO: 82674 - DNA, 25 bp, Homo sapiens
tgcttcagatatgggacactgtctc

SEQ ID NO: 82675 - DNA, 25 bp, Homo sapiens
ccctggaatgcctgcctgaatcttc

SEQ ID NO: 82676 - DNA, 25 bp, Homo sapiens
cacggcttcggatgctatgaaacta

SEQ ID NO: 82677 - DNA, 25 bp, Homo sapiens
aggccatgtggttcttgtcctgacc

SEQ ID NO: 82678 - DNA, 25 bp, Homo sapiens
aactctctacccaggttccctggga

SEQ ID NO: 82679 - DNA, 25 bp, Homo sapiens
ggcatctctcacattcagtcaccta

SEQ ID NO: 82680 - DNA, 25 bp, Homo sapiens
ctgggccatatattatcatctgttg

SEQ ID NO: 82681 - DNA, 25 bp, Homo sapiens
aagggttgtactctggccattcacg

SEQ ID NO: 82682 - DNA, 25 bp, Homo sapiens
atcctgaccctctacgggtcacaaa

SEQ ID NO: 82683 - DNA, 25 bp, Homo sapiens
ggatgccttctatttgcccagtgtg

SEQ ID NO: 82684 - DNA, 25 bp, Homo sapiens
gtgcccgtgccattacatattcttc

SEQ ID NO: 82685 - DNA, 25 bp, Homo sapiens
ggccacgtggttcttgtcctgattc

SEQ ID NO: 82686 - DNA, 25 bp, Homo sapiens
ggcatctctcacattcagtcacctg

SEQ ID NO: 82687 - DNA, 25 bp, Homo sapiens
cagaaaacatgctgggtctcatata

SEQ ID NO: 82688 - DNA, 25 bp, Homo sapiens
ggcgcctttatctctggtttgctta

SEQ ID NO: 82689 - DNA, 25 bp, Homo sapiens
cctagtctgtgtgggtttcatttac

SEQ ID NO: 82690 - DNA, 25 bp, Homo sapiens
ggccacgtggttgttgtccttactc

SEQ ID NO: 82691 - DNA, 25 bp, Homo sapiens
ggctatgacttaggactgcctctta

SEQ ID NO: 82692 - DNA, 25 bp, Homo sapiens
gcagagaacttgtgattggcctatt

SEQ ID NO: 82693 - DNA, 25 bp, Homo sapiens
ctgtgctaggtactatgatctgttc

SEQ ID NO: 82694 - DNA, 25 bp, Homo sapiens
gcttcaaacttcatgaattggtttt

SEQ ID NO: 82695 - DNA, 25 bp, Homo sapiens
tcccagcatggagcaagccttttcc

SEQ ID NO: 82696 - DNA, 25 bp, Homo sapiens
gtaaatcttaacatagggcctcagg

SEQ ID NO: 82697 - DNA, 25 bp, Homo sapiens
cacgggattttgtctcatagtttca

SEQ ID NO: 82698 - DNA, 25 bp, Homo sapiens
ggcatctctcactttcagtcagcta

SEQ ID NO: 82699 - DNA, 25 bp, Homo sapiens
cctctgtagtataacaggtttttta

SEQ ID NO: 82700 - DNA, 25 bp, Homo sapiens
gccaccgtgaggaaatcgtttaata

SEQ ID NO: 82701 - DNA, 25 bp, Homo sapiens
tccgtggcatcaaactgtctctttc

SEQ ID NO: 82702 - DNA, 25 bp, Homo sapiens
tcctgtcaaggtggctcagagtttc

SEQ ID NO: 82703 - DNA, 25 bp, Homo sapiens
ggttccctagcagttctactccata

SEQ ID NO: 82704 - DNA, 25 bp, Homo sapiens
cagagaacttcttgattggactatt

SEQ ID NO: 82705 - DNA, 25 bp, Homo sapiens
taggcatctctcacattcagtcacc

SEQ ID NO: 82706 - DNA, 25 bp, Homo sapiens
acttgctggacctgtaactgtgtga

SEQ ID NO: 82707 - DNA, 25 bp, Homo sapiens
cgcgatggcagtattgctccacata

SEQ ID NO: 82708 - DNA, 25 bp, Homo sapiens
agccttctgagccttctgtggtgca

SEQ ID NO: 82709 - DNA, 25 bp, Homo sapiens
gagttttactgcacgatctgaccta

SEQ ID NO: 82710 - DNA, 25 bp, Homo sapiens
ggcatctcacacatttagtcaccta

SEQ ID NO: 82711 - DNA, 25 bp, Homo sapiens
tttgcctatgcacatataatatgga

SEQ ID NO: 82712 - DNA, 25 bp, Homo sapiens
atgatatcttatctcttcgatataa

SEQ ID NO: 82713 - DNA, 25 bp, Homo sapiens
gagttgcttttctggagagatggac

SEQ ID NO: 82714 - DNA, 25 bp, Homo sapiens
caggcctgtctttggtgttctcata

SEQ ID NO: 82715 - DNA, 25 bp, Homo sapiens
aggtcttgttgccttctcctctaag

SEQ ID NO: 82716 - DNA, 25 bp, Homo sapiens
gaggctccgagaccaccaggattta

SEQ ID NO: 82717 - DNA, 25 bp, Homo sapiens
tatatatacattcctaatttcatgc

SEQ ID NO: 82718 - DNA, 25 bp, Homo sapiens
ctaggtttggggacaccagcatttc

SEQ ID NO: 82719 - DNA, 25 bp, Homo sapiens
ggttcctggaattggcctgtcattg

SEQ ID NO: 82720 - DNA, 25 bp, Homo sapiens
ccaggttccctaggagttccatttc

SEQ ID NO: 82721 - DNA, 25 bp, Homo sapiens
ggcacatctcatattcagtcactta

SEQ ID NO: 82722 - DNA, 25 bp, Homo sapiens
tgggctacgtattatgatttgttcc

SEQ ID NO: 82723 - DNA, 25 bp, Homo sapiens
gagttgcttttctggagagatggac

SEQ ID NO: 82724 - DNA, 25 bp, Homo sapiens
caggcctgtctttggtgttctcata

SEQ ID NO: 82725 - DNA, 25 bp, Homo sapiens
actgccaccgtgaggaaattgttta

SEQ ID NO: 82726 - DNA, 25 bp, Homo sapiens
actgcctcctcaggggataaatttg

SEQ ID NO: 82727 - DNA, 25 bp, Homo sapiens
acacatacactttttctctttgggg

SEQ ID NO: 82728 - DNA, 25 bp, Homo sapiens
gtggtaagtttaatcctcaaggttc

SEQ ID NO: 82729 - DNA, 25 bp, Homo sapiens
ttaccctggaatgcctgcctgaatc

SEQ ID NO: 82730 - DNA, 25 bp, Homo sapiens
gtggcttttccttccgcaactgcta

SEQ ID NO: 82731 - DNA, 25 bp, Homo sapiens
cccaggattttgtcttacagtttca

SEQ ID NO: 82732 - DNA, 25 bp, Homo sapiens
ggttcctgaccaatttttgacattg

SEQ ID NO: 82733 - DNA, 25 bp, Homo sapiens
cttcggcatcaccttataatctttg

SEQ ID NO: 82734 - DNA, 25 bp, Homo sapiens
agagtatagcctttccggttctttt

SEQ ID NO: 82735 - DNA, 25 bp, Homo sapiens
gagttgcctttccagagagagggac

SEQ ID NO: 82736 - DNA, 25 bp, Homo sapiens
gagggcgccaagaccagactactta

SEQ ID NO: 82737 - DNA, 25 bp, Homo sapiens
tgggttggctcagtactttcacatg

SEQ ID NO: 82738 - DNA, 25 bp, Homo sapiens
tttggatcagaccagatgtgtattc

SEQ ID NO: 82739 - DNA, 25 bp, Homo sapiens
ctctcctggcgataggtagaccata

SEQ ID NO: 82740 - DNA, 25 bp, Homo sapiens
gcagcttgatggctacatgcattca

SEQ ID NO: 82741 - DNA, 25 bp, Homo sapiens
aagacctcgtgctttgcttcccaga

SEQ ID NO: 82742 - DNA, 25 bp, Homo sapiens
tttttgccacctgatttttgcactt

SEQ ID NO: 82743 - DNA, 25 bp, Homo sapiens
gggcgacctgctcatactgctggaa

SEQ ID NO: 82744 - DNA, 25 bp, Homo sapiens
tttctaggcagcaggccacatgttc

SEQ ID NO: 82745 - DNA, 25 bp, Homo sapiens
ggccttcattttcagggacctcaca

SEQ ID NO: 82746 - DNA, 25 bp, Homo sapiens
caccctaggaggagaatttaggacg

SEQ ID NO: 82747 - DNA, 25 bp, Homo sapiens
tccacttcatttctgatgtttgagt

SEQ ID NO: 82748 - DNA, 25 bp, Homo sapiens
gcttttgggaggcatctgaatctta

SEQ ID NO: 82749 - DNA, 25 bp, Homo sapiens
cagggaggactcaggtaacaaattc

SEQ ID NO: 82750 - DNA, 25 bp, Homo sapiens
cgataggtcattttgtgttcactta

SEQ ID NO: 82751 - DNA, 25 bp, Homo sapiens
taggaagtcacggttcacacagttg

SEQ ID NO: 82752 - DNA, 25 bp, Homo sapiens
tgggccttctcaacttcaactctta

SEQ ID NO: 82753 - DNA, 25 bp, Homo sapiens
gccaccgcatgggtcattaaatatc

SEQ ID NO: 82754 - DNA, 25 bp, Homo sapiens
tgcactcctgtctcctatgggaatg

SEQ ID NO: 82755 - DNA, 25 bp, Homo sapiens
ccggtcagttctggccacttctaca

SEQ ID NO: 82756 - DNA, 25 bp, Homo sapiens
acgcagctttctaggttaccaggga

SEQ ID NO: 82757 - DNA, 25 bp, Homo sapiens
cactgaattcacaggtttgcatttt

SEQ ID NO: 82758 - DNA, 25 bp, Homo sapiens
tgccatctctgacattcctccgata

SEQ ID NO: 82759 - DNA, 25 bp, Homo sapiens
tgagcacccattcataaacagtatg

SEQ ID NO: 82760 - DNA, 25 bp, Homo sapiens
cgggatggctcccaatgcttcttca

SEQ ID NO: 82761 - DNA, 25 bp, Homo sapiens
actcaaggccgggaggttatctcta

SEQ ID NO: 82762 - DNA, 25 bp, Homo sapiens
atctgctgttggaaatctgctcata

SEQ ID NO: 82763 - DNA, 25 bp, Homo sapiens
ttggtcccactacacatagaatttg

SEQ ID NO: 82764 - DNA, 25 bp, Homo sapiens
tcttccctaaatcagaggtgtggtc

SEQ ID NO: 82765 - DNA, 25 bp, Homo sapiens
ctccaccctgggcaagtagaattca

SEQ ID NO: 82766 - DNA, 25 bp, Homo sapiens
cctacttagggctagggtccactca

SEQ ID NO: 82767 - DNA, 25 bp, Homo sapiens
ggcagccatgtcagaaccctaatag

SEQ ID NO: 82768 - DNA, 25 bp, Homo sapiens
gcctctgggagcatggactatcctt

SEQ ID NO: 82769 - DNA, 25 bp, Homo sapiens
ggacttcctgccagaggccgactta

SEQ ID NO: 82770 - DNA, 25 bp, Homo sapiens
tgtctggaaccctaagctaagtgtc

SEQ ID NO: 82771 - DNA, 25 bp, Homo sapiens
cctgggcagtttgtcattatcatga

SEQ ID NO: 82772 - DNA, 25 bp, Homo sapiens
cgtactccatcaaaggttcaaggtg

SEQ ID NO: 82773 - DNA, 25 bp, Homo sapiens
ttctaccctggaaagagccttatta

SEQ ID NO: 82774 - DNA, 25 bp, Homo sapiens
aggactctctcatgtgttcaacaca

SEQ ID NO: 82775 - DNA, 25 bp, Homo sapiens
ctgtagaatgacataagacactgtg

SEQ ID NO: 82776 - DNA, 25 bp, Homo sapiens
caggcattactgagggcattgaaca

SEQ ID NO: 82777 - DNA, 25 bp, Homo sapiens
ccaggcctaggagacagaagcatga

SEQ ID NO: 82778 - DNA, 25 bp, Homo sapiens
gtggatgatccacagcaccctcgga

SEQ ID NO: 82779 - DNA, 25 bp, Homo sapiens
cgctgtgtccctgtgaataggcatc

SEQ ID NO: 82780 - DNA, 25 bp, Homo sapiens
gaaagacataaagcaaaggaaaaag

SEQ ID NO: 82781 - DNA, 25 bp, Homo sapiens
agcccactgggataagacacaattc

SEQ ID NO: 82782 - DNA, 25 bp, Homo sapiens
gccttcctttgggatcagataagta

SEQ ID NO: 82783 - DNA, 25 bp, Homo sapiens
gcccttgtattcgtggtgcttagca

SEQ ID NO: 82784 - DNA, 25 bp, Homo sapiens
tgggcactgtggatgaaacctgttt

SEQ ID NO: 82785 - DNA, 25 bp, Homo sapiens
ctgctcttgtaaattttgattactc

SEQ ID NO: 82786 - DNA, 25 bp, Homo sapiens
accctttcatgtgtccctgctggca

SEQ ID NO: 82787 - DNA, 25 bp, Homo sapiens
gtccgtggtcactgccctcaaaaac

SEQ ID NO: 82788 - DNA, 25 bp, Homo sapiens
ccctaaccactgtgaggtatgttca

SEQ ID NO: 82789 - DNA, 25 bp, Homo sapiens
cccaggctgtcctaggtgactatta

SEQ ID NO: 82790 - DNA, 25 bp, Homo sapiens
gccatgattaagctccgggtaccta

SEQ ID NO: 82791 - DNA, 25 bp, Homo sapiens
ccctggatgattgggaggtctcact

SEQ ID NO: 82792 - DNA, 25 bp, Homo sapiens
gtcatcctggaatctgctgctgcta

SEQ ID NO: 82793 - DNA, 25 bp, Homo sapiens
gggaagtcctgccttttcagtaaga

SEQ ID NO: 82794 - DNA, 25 bp, Homo sapiens
ccctagtgttgtgttccgctgatga

SEQ ID NO: 82795 - DNA, 25 bp, Homo sapiens
gggtcctgtttttgcatccaaggaa

SEQ ID NO: 82796 - DNA, 25 bp, Homo sapiens
gcccttgtaccattagattcccaga

SEQ ID NO: 82797 - DNA, 25 bp, Homo sapiens
actggtgtctttccagctgtcaata

SEQ ID NO: 82798 - DNA, 25 bp, Homo sapiens
ttggattccagtcttgcaaggcacc

SEQ ID NO: 82799 - DNA, 25 bp, Homo sapiens
gcaaagaaaaaagatggtatcggag

SEQ ID NO: 82800 - DNA, 25 bp, Homo sapiens
ctgggtgtcacctacaagataaaga

SEQ ID NO: 82801 - DNA, 25 bp, Homo sapiens
acgggttctctgctctcctacagga

SEQ ID NO: 82802 - DNA, 25 bp, Homo sapiens
atcgtggcttctcccatcaaggctg

SEQ ID NO: 82803 - DNA, 25 bp, Homo sapiens
cactgtgggtgaaaccctgtctttc

SEQ ID NO: 82804 - DNA, 25 bp, Homo sapiens
ctgtgagacaggagctcctctgtga

SEQ ID NO: 82805 - DNA, 25 bp, Homo sapiens
ggggctcttctataccaacctgctg

SEQ ID NO: 82806 - DNA, 25 bp, Homo sapiens
tcagctgtttcctggctttgcaacc

SEQ ID NO: 82807 - DNA, 25 bp, Homo sapiens
cagccactgtgagggatgttcttta

SEQ ID NO: 82808 - DNA, 25 bp, Homo sapiens
ctgcaagccagggtccatgagaaga

SEQ ID NO: 82809 - DNA, 25 bp, Homo sapiens
ttggaagctccatggcagaacactg

SEQ ID NO: 82810 - DNA, 25 bp, Homo sapiens
gacgtccttgtagtatttcctctga

SEQ ID NO: 82811 - DNA, 25 bp, Homo sapiens
cttatgcttgtgaacgctacagcta

SEQ ID NO: 82812 - DNA, 25 bp, Homo sapiens
cctcctcctccatctgtttaatttt

SEQ ID NO: 82813 - DNA, 25 bp, Homo sapiens
agtgcaccaggccaagcttattgga

SEQ ID NO: 82814 - DNA, 25 bp, Homo sapiens
ctgggcgcgaaactaaaggcccttc

SEQ ID NO: 82815 - DNA, 25 bp, Homo sapiens
tccagcgctgaatgttgactccggc

SEQ ID NO: 82816 - DNA, 25 bp, Homo sapiens
cccgtttttggtcggtttcagcggc

SEQ ID NO: 82817 - DNA, 25 bp, Homo sapiens
tcctggaagactcggaactctgttc

SEQ ID NO: 82818 - DNA, 25 bp, Homo sapiens
gtttcagggccgcaaaattatcagg

SEQ ID NO: 82819 - DNA, 25 bp, Homo sapiens
ggagacacacgcacacctggctata

SEQ ID NO: 82820 - DNA, 25 bp, Homo sapiens
ctggcctcacccgatactatgtttc

SEQ ID NO: 82821 - DNA, 25 bp, Homo sapiens
gaagtcccattttcgctgctcctga

SEQ ID NO: 82822 - DNA, 25 bp, Homo sapiens
agcggcaccgttccgttgactgcag

SEQ ID NO: 82823 - DNA, 25 bp, Homo sapiens
agctgggctcagacttcactaccga

SEQ ID NO: 82824 - DNA, 25 bp, Homo sapiens
ggcggcatcattgggctgtactgca

SEQ ID NO: 82825 - DNA, 25 bp, Homo sapiens
ctgggcagggagtacttatctttct

SEQ ID NO: 82826 - DNA, 25 bp, Homo sapiens
cgggaccataccatgaaggcgttca

SEQ ID NO: 82827 - DNA, 25 bp, Homo sapiens
ctacggggttcttgagttcagtctc

SEQ ID NO: 82828 - DNA, 25 bp, Homo sapiens
cgggcttctcgcacctgatgagttc

SEQ ID NO: 82829 - DNA, 25 bp, Homo sapiens
atgcgccctggccaatcattaccga

SEQ ID NO: 82830 - DNA, 25 bp, Homo sapiens
ctcagaggccaccaattagggtttc

SEQ ID NO: 82831 - DNA, 25 bp, Homo sapiens
agcccgcaaagcttcccgttgtctg

SEQ ID NO: 82832 - DNA, 25 bp, Homo sapiens
ccagatctttctctaggagggccag

SEQ ID NO: 82833 - DNA, 25 bp, Homo sapiens
gtgaactggcctccgctctctcgat

SEQ ID NO: 82834 - DNA, 25 bp, Homo sapiens
ttttcatggcaacacggagcctctc

SEQ ID NO: 82835 - DNA, 25 bp, Homo sapiens
gattcaaaacctacaaaagcctgcc

SEQ ID NO: 82836 - DNA, 25 bp, Homo sapiens
gacaaacaatccagtgccggcgggg

SEQ ID NO: 82837 - DNA, 25 bp, Homo sapiens
tgattccaacgaggccaacgagatg

SEQ ID NO: 82838 - DNA, 25 bp, Homo sapiens
ggtgaccctacccacgctcctcttc

SEQ ID NO: 82839 - DNA, 25 bp, Homo sapiens
gtgcttcaaccttcttcttctctgg

SEQ ID NO: 82840 - DNA, 25 bp, Homo sapiens
aacccgcattccttcttctcatgaa

SEQ ID NO: 82841 - DNA, 25 bp, Homo sapiens
atcctgttcacccaaaataatgtcc

SEQ ID NO: 82842 - DNA, 25 bp, Homo sapiens
ctttcttaacagatgccggagaccc

SEQ ID NO: 82843 - DNA, 25 bp, Homo sapiens
agacccgcaacctgctcctaaaaaa

SEQ ID NO: 82844 - DNA, 25 bp, Homo sapiens
accatactagtggttcgctacagga

SEQ ID NO: 82845 - DNA, 25 bp, Homo sapiens
agaggaactgctgaatgaccacgcc

SEQ ID NO: 82846 - DNA, 25 bp, Homo sapiens
ctccaaatggaggaggaggaattca

SEQ ID NO: 82847 - DNA, 25 bp, Homo sapiens
ctgcaaagtagcaagaagctacatc

SEQ ID NO: 82848 - DNA, 25 bp, Homo sapiens
ataaagtttgagaagctgatggctg

SEQ ID NO: 82849 - DNA, 25 bp, Homo sapiens
atccttatgtggtggaaagcctttc

SEQ ID NO: 82850 - DNA, 25 bp, Homo sapiens
atcgtactggcaaggcagcactcca

SEQ ID NO: 82851 - DNA, 25 bp, Homo sapiens
cttcagcacaaggtgtcgcttcttc

SEQ ID NO: 82852 - DNA, 25 bp, Homo sapiens
catttttacactttcttggcagggg

SEQ ID NO: 82853 - DNA, 25 bp, Homo sapiens
gccctctggctcaataatgtctgtg

SEQ ID NO: 82854 - DNA, 25 bp, Homo sapiens
cggagacctgctatcatggccaatg

SEQ ID NO: 82855 - DNA, 25 bp, Homo sapiens
tgctactactaaggaccaatttttg

SEQ ID NO: 82856 - DNA, 25 bp, Homo sapiens
ttcccaggtgcagggtgcagaatca

SEQ ID NO: 82857 - DNA, 25 bp, Homo sapiens
ggttggttaacgacactttgccctg

SEQ ID NO: 82858 - DNA, 25 bp, Homo sapiens
gctctgtaaagaaaccatctgcatg

SEQ ID NO: 82859 - DNA, 25 bp, Homo sapiens
gtctcctgaatttttatctggaggc

SEQ ID NO: 82860 - DNA, 25 bp, Homo sapiens
cacatctacagataaaagacattaa

SEQ ID NO: 82861 - DNA, 25 bp, Homo sapiens
tgaaaaaataaaaggtatggacatc

SEQ ID NO: 82862 - DNA, 25 bp, Homo sapiens
tttatgtttagtgagtgggacattt

SEQ ID NO: 82863 - DNA, 25 bp, Homo sapiens
ggactgattcactaaggctactttg

SEQ ID NO: 82864 - DNA, 25 bp, Homo sapiens
tgttagaaaatactctcaagagctt

SEQ ID NO: 82865 - DNA, 25 bp, Homo sapiens
agtgaggtaccgaacgtaagtttca

SEQ ID NO: 82866 - DNA, 25 bp, Homo sapiens
cccgtggtagctcttcatgtctttg

SEQ ID NO: 82867 - DNA, 25 bp, Homo sapiens
gcccttgccaacgtctcatctagta

SEQ ID NO: 82868 - DNA, 25 bp, Homo sapiens
tccctcagagactagcagtaaagtt

SEQ ID NO: 82869 - DNA, 25 bp, Homo sapiens
ggcctgtcattatccacacctagga

SEQ ID NO: 82870 - DNA, 25 bp, Homo sapiens
cagtggtggtcatatgtagcattgc

SEQ ID NO: 82871 - DNA, 25 bp, Homo sapiens
ctaaaatgcttttcatctcttcatc

SEQ ID NO: 82872 - DNA, 25 bp, Homo sapiens
ttactatcggtacaggcagctactc

SEQ ID NO: 82873 - DNA, 25 bp, Homo sapiens
tctctccttcgtgcctgtgtgattg

SEQ ID NO: 82874 - DNA, 25 bp, Homo sapiens
ttctacgcacgttggggcattaccc

SEQ ID NO: 82875 - DNA, 25 bp, Homo sapiens
ttgggagcctgagacatgaacttta

SEQ ID NO: 82876 - DNA, 25 bp, Homo sapiens
cccaaccgtggctgctattatagtg

SEQ ID NO: 82877 - DNA, 25 bp, Homo sapiens
ggaggctgccctacttcaggatttc

SEQ ID NO: 82878 - DNA, 25 bp, Homo sapiens
ccatccttttgcaactgagggctga

SEQ ID NO: 82879 - DNA, 25 bp, Homo sapiens
tttgcctcagctagcagccagtatg

SEQ ID NO: 82880 - DNA, 25 bp, Homo sapiens
tagcaccttgttcttcccactgaga

SEQ ID NO: 82881 - DNA, 25 bp, Homo sapiens
agtgcacgggtttctcattttttca

SEQ ID NO: 82882 - DNA, 25 bp, Homo sapiens
tgtccttgctacctgagagatcctg

SEQ ID NO: 82883 - DNA, 25 bp, Homo sapiens
gccagcagcctcaaagccacatatt

SEQ ID NO: 82884 - DNA, 25 bp, Homo sapiens
cacgtgagtttgagtccagcttttc

SEQ ID NO: 82885 - DNA, 25 bp, Homo sapiens
caggaagattccgttgcccacaatt

SEQ ID NO: 82886 - DNA, 25 bp, Homo sapiens
ccagttcatgtaatagccagacttg

SEQ ID NO: 82887 - DNA, 25 bp, Homo sapiens
gtacgtccaggctctcattcaatca

SEQ ID NO: 82888 - DNA, 25 bp, Homo sapiens
gcaccgtagtgctgtttattatacc

SEQ ID NO: 82889 - DNA, 25 bp, Homo sapiens
tcggtgattaccttttttgagacta

SEQ ID NO: 82890 - DNA, 25 bp, Homo sapiens
aagaaacaaaaaatgtgatggaaat

SEQ ID NO: 82891 - DNA, 25 bp, Homo sapiens
cagctggcctgtcctccaataattc

SEQ ID NO: 82892 - DNA, 25 bp, Homo sapiens
aacaccttgtgtggagtttctaagc

SEQ ID NO: 82893 - DNA, 25 bp, Homo sapiens
cttctgtgaagaaggcaacattaac

SEQ ID NO: 82894 - DNA, 25 bp, Homo sapiens
gggctgacatttgacatactctgta

SEQ ID NO: 82895 - DNA, 25 bp, Homo sapiens
ggtgccttttatccctgtttgaatg

SEQ ID NO: 82896 - DNA, 25 bp, Homo sapiens
tgcagaagctctcttccggaaaaga

SEQ ID NO: 82897 - DNA, 25 bp, Homo sapiens
tactacaggccagttggggtcctta

SEQ ID NO: 82898 - DNA, 25 bp, Homo sapiens
gagaaataagtttttccaattcatt

SEQ ID NO: 82899 - DNA, 25 bp, Homo sapiens
gcttggcatggaaagacaatatttt

SEQ ID NO: 82900 - DNA, 25 bp, Homo sapiens
atcaggtgtttctaattgccatcaa

SEQ ID NO: 82901 - DNA, 25 bp, Homo sapiens
ttcatgagaagtgttacggatagtc

SEQ ID NO: 82902 - DNA, 25 bp, Homo sapiens
catttaatttgttatgtgggccttt

SEQ ID NO: 82903 - DNA, 25 bp, Homo sapiens
agggtaggacggctcattatgaatc

SEQ ID NO: 82904 - DNA, 25 bp, Homo sapiens
ggctgcctcatagtcacatctctaa

SEQ ID NO: 82905 - DNA, 25 bp, Homo sapiens
acagaggctctgcatgattattaca

SEQ ID NO: 82906 - DNA, 25 bp, Homo sapiens
gcttgtgacagatatacattgatta

SEQ ID NO: 82907 - DNA, 25 bp, Homo sapiens
tgtgttcacagctggcactcatcta

SEQ ID NO: 82908 - DNA, 25 bp, Homo sapiens
tgccgccctctcattaaataagcaa

SEQ ID NO: 82909 - DNA, 25 bp, Homo sapiens
gagtgtagacatgcaaggacattcc

SEQ ID NO: 82910 - DNA, 25 bp, Homo sapiens
gtcatgcctgtagagaaaaataaag

SEQ ID NO: 82911 - DNA, 25 bp, Homo sapiens
tagctttactagataagcagaagta

SEQ ID NO: 82912 - DNA, 25 bp, Homo sapiens
tacctgcaactggagaaggtaacta

SEQ ID NO: 82913 - DNA, 25 bp, Homo sapiens
cgaccatgcgattgaagccctgtta

SEQ ID NO: 82914 - DNA, 25 bp, Homo sapiens
gctcgtggagactgttgttaaaacc

SEQ ID NO: 82915 - DNA, 25 bp, Homo sapiens
acttggaaaacctcagcagcattta

SEQ ID NO: 82916 - DNA, 25 bp, Homo sapiens
atgcccgcttttctgcctttaggta

SEQ ID NO: 82917 - DNA, 25 bp, Homo sapiens
gcaaggatctatgcaagtcaaaggg

SEQ ID NO: 82918 - DNA, 25 bp, Homo sapiens
gtcccactggatgcaccagatattg

SEQ ID NO: 82919 - DNA, 25 bp, Homo sapiens
gaaatgagctttatcattgtctgcc

SEQ ID NO: 82920 - DNA, 25 bp, Homo sapiens
aatgcgcccttttctggatttcaga

SEQ ID NO: 82921 - DNA, 25 bp, Homo sapiens
tagtatttctggtttcagctccaaa

SEQ ID NO: 82922 - DNA, 25 bp, Homo sapiens
atgggctggggatgtcctaaaagtc

SEQ ID NO: 82923 - DNA, 25 bp, Homo sapiens
tgctgaggaagccaccgaaaatttc

SEQ ID NO: 82924 - DNA, 25 bp, Homo sapiens
gtcatggtgacttcttgccctcttc

SEQ ID NO: 82925 - DNA, 25 bp, Homo sapiens
aaattccaaatattttgctcatatg

SEQ ID NO: 82926 - DNA, 25 bp, Homo sapiens
gcccaccttgaatttctagcacatg

SEQ ID NO: 82927 - DNA, 25 bp, Homo sapiens
cacgtgtctgtgtatggcttctgaa

SEQ ID NO: 82928 - DNA, 25 bp, Homo sapiens
ggccattgatgcttgctctccagta

SEQ ID NO: 82929 - DNA, 25 bp, Homo sapiens
aggcgagaccttactgaaagctatc

SEQ ID NO: 82930 - DNA, 25 bp, Homo sapiens
agctacagcaacaacacttgtgata

SEQ ID NO: 82931 - DNA, 25 bp, Homo sapiens
tcaggctcttcattaatgtctcttc

SEQ ID NO: 82932 - DNA, 25 bp, Homo sapiens
ttgaagcttatgacagaactggatc

SEQ ID NO: 82933 - DNA, 25 bp, Homo sapiens
tttttttttgtaaacagcaagaatg

SEQ ID NO: 82934 - DNA, 25 bp, Homo sapiens
attatgaaaagagaattatacaatg

SEQ ID NO: 82935 - DNA, 25 bp, Homo sapiens
agctagcagtgtatgtcaggtagtt

SEQ ID NO: 82936 - DNA, 25 bp, Homo sapiens
gcactttactgcagggaattctcta

SEQ ID NO: 82937 - DNA, 25 bp, Homo sapiens
tttggcctccttctgcaacctcatg

SEQ ID NO: 82938 - DNA, 25 bp, Homo sapiens
gtagtatataaacacaatctttcac

SEQ ID NO: 82939 - DNA, 25 bp, Homo sapiens
ctcctggagggtagttttagcaata

SEQ ID NO: 82940 - DNA, 25 bp, Homo sapiens
agagtctgtggtgccaaaccctttc

SEQ ID NO: 82941 - DNA, 25 bp, Homo sapiens
ctgaacacaagtcaaatgtcacatc

SEQ ID NO: 82942 - DNA, 25 bp, Homo sapiens
aatattcctatagtcagaacaaata

SEQ ID NO: 82943 - DNA, 25 bp, Homo sapiens
tgtgagcacacccaggactataata

SEQ ID NO: 82944 - DNA, 25 bp, Homo sapiens
ttcagtgtcctttcttgctcccagg

SEQ ID NO: 82945 - DNA, 25 bp, Homo sapiens
ggggcatatgccttctatagccaaa

SEQ ID NO: 82946 - DNA, 25 bp, Homo sapiens
agggatgcccttaccaagctgttta

SEQ ID NO: 82947 - DNA, 25 bp, Homo sapiens
gactgttactcaatgcctggagata

SEQ ID NO: 82948 - DNA, 25 bp, Homo sapiens
cctagtgtttgtcaggcctagctaa

SEQ ID NO: 82949 - DNA, 25 bp, Homo sapiens
agcctttggcttcctatgtaaatga

SEQ ID NO: 82950 - DNA, 25 bp, Homo sapiens
actcaagggtaatggatacaattcc

SEQ ID NO: 82951 - DNA, 25 bp, Homo sapiens
ccagaatttggtatctttttgaata

SEQ ID NO: 82952 - DNA, 25 bp, Homo sapiens
agaaaaaaggggccaactcttagct

SEQ ID NO: 82953 - DNA, 25 bp, Homo sapiens
taaggattttcattttcagtgctag

SEQ ID NO: 82954 - DNA, 25 bp, Homo sapiens
agagatagagatggagacaaatata

SEQ ID NO: 82955 - DNA, 25 bp, Homo sapiens
agacttctcttctagggctattatg

SEQ ID NO: 82956 - DNA, 25 bp, Homo sapiens
atggtggcactcctgcttgctagta

SEQ ID NO: 82957 - DNA, 25 bp, Homo sapiens
gcaagagtttaggtttcattcattc

SEQ ID NO: 82958 - DNA, 25 bp, Homo sapiens
ccggggataaaatcaaccaccttaa

SEQ ID NO: 82959 - DNA, 25 bp, Homo sapiens
ggcttgaaagccatgtgcagaaata

SEQ ID NO: 82960 - DNA, 25 bp, Homo sapiens
cctgctttgggatgtgtacctgatc

SEQ ID NO: 82961 - DNA, 25 bp, Homo sapiens
cagccctgtcattcctcttaaagta

SEQ ID NO: 82962 - DNA, 25 bp, Homo sapiens
cccaggtttggtttcctaggaaata

SEQ ID NO: 82963 - DNA, 25 bp, Homo sapiens
gtcctgtggtggaacactaatttta

SEQ ID NO: 82964 - DNA, 25 bp, Homo sapiens
aatcctctctttttgctggcaagtg

SEQ ID NO: 82965 - DNA, 25 bp, Homo sapiens
tgctccatgtgacagaatcatagtg

SEQ ID NO: 82966 - DNA, 25 bp, Homo sapiens
gttaccggcttcctatgacattcta

SEQ ID NO: 82967 - DNA, 25 bp, Homo sapiens
tgaggaaactccttcccactgaatc

SEQ ID NO: 82968 - DNA, 25 bp, Homo sapiens
tgcgtatttatgatgcactatatta

SEQ ID NO: 82969 - DNA, 25 bp, Homo sapiens
aaaaattaaaaaaactgtcatcaca

SEQ ID NO: 82970 - DNA, 25 bp, Homo sapiens
cacacacccacacatatgaatcaac

SEQ ID NO: 82971 - DNA, 25 bp, Homo sapiens
ttgaattccttttttgtacacgtga

SEQ ID NO: 82972 - DNA, 25 bp, Homo sapiens
cttctacctgatggtaacttattta

SEQ ID NO: 82973 - DNA, 25 bp, Homo sapiens
gcagctggctaccacctcaaaatgg

SEQ ID NO: 82974 - DNA, 25 bp, Homo sapiens
agtcaagttctgctgcctcagggca

SEQ ID NO: 82975 - DNA, 25 bp, Homo sapiens
tccaggtgtttttgaagagctcttc

SEQ ID NO: 82976 - DNA, 25 bp, Homo sapiens
tgtttgtttttctggtccagaccta

SEQ ID NO: 82977 - DNA, 25 bp, Homo sapiens
cttcgttcaagtatgggccaaattc

SEQ ID NO: 82978 - DNA, 25 bp, Homo sapiens
tccctgcctgagagatatcgccttc

SEQ ID NO: 82979 - DNA, 25 bp, Homo sapiens
caccatctataatgctggagactta

SEQ ID NO: 82980 - DNA, 25 bp, Homo sapiens
gtctcagccctcttttctattgtaa

SEQ ID NO: 82981 - DNA, 25 bp, Homo sapiens
cctgtctgtttgctgggaccacaca

SEQ ID NO: 82982 - DNA, 25 bp, Homo sapiens
gctcaaccctgcatgtcaagtatca

SEQ ID NO: 82983 - DNA, 25 bp, Homo sapiens
ttggagcactgactacgtgattatc

SEQ ID NO: 82984 - DNA, 25 bp, Homo sapiens
tccaagagctagtactgggtcttta

SEQ ID NO: 82985 - DNA, 25 bp, Homo sapiens
ttcccttggcacattttggcagatg

SEQ ID NO: 82986 - DNA, 25 bp, Homo sapiens
cacgattgcccacagaacagagttc

SEQ ID NO: 82987 - DNA, 25 bp, Homo sapiens
actggcatatggactttgaagaccc

SEQ ID NO: 82988 - DNA, 25 bp, Homo sapiens
tcgcgtgttttgcagccaacctgta

SEQ ID NO: 82989 - DNA, 25 bp, Homo sapiens
ctccaagtgtgctttgtggtacaca

SEQ ID NO: 82990 - DNA, 25 bp, Homo sapiens
agtgcatccatgattctcgttgtta

SEQ ID NO: 82991 - DNA, 25 bp, Homo sapiens
attttcaacaatttcactgggtcac

SEQ ID NO: 82992 - DNA, 25 bp, Homo sapiens
atgtctttgaaatttaaaatcacca

SEQ ID NO: 82993 - DNA, 25 bp, Homo sapiens
tgtggtcttaagcatactactgttg

SEQ ID NO: 82994 - DNA, 25 bp, Homo sapiens
cacttgcagggcagctaggtcaata

SEQ ID NO: 82995 - DNA, 25 bp, Homo sapiens
agggtgccttgttttatctacttca

SEQ ID NO: 82996 - DNA, 25 bp, Homo sapiens
gttccagccattgtgccaagctttg

SEQ ID NO: 82997 - DNA, 25 bp, Homo sapiens
tacctgtcctccacctactaagatg

SEQ ID NO: 82998 - DNA, 25 bp, Homo sapiens
ctctaggccaagacagatgagcatc

SEQ ID NO: 82999 - DNA, 25 bp, Homo sapiens
tctaatggatattgggttaacaata

SEQ ID NO: 83000 - DNA, 25 bp, Homo sapiens
gggttgaactctcttccaggttgtg

SEQ ID NO: 83001 - DNA, 25 bp, Homo sapiens
tgctgtcaatctctctcactgggga

SEQ ID NO: 83002 - DNA, 25 bp, Homo sapiens
tctcttgatagatacattgcttccc

SEQ ID NO: 83003 - DNA, 25 bp, Homo sapiens
ggaaaaactagtaagtagaaaacaa

SEQ ID NO: 83004 - DNA, 25 bp, Homo sapiens
cgttcctgttgcatcttgtaaccta

SEQ ID NO: 83005 - DNA, 25 bp, Homo sapiens
agtgccatgcagactctagtttttc

SEQ ID NO: 83006 - DNA, 25 bp, Homo sapiens
gcatgtgtttccagtcccaaggcta

SEQ ID NO: 83007 - DNA, 25 bp, Homo sapiens
gctcatttctttctgggccgttgta

SEQ ID NO: 83008 - DNA, 25 bp, Homo sapiens
gacctgactctaccggctttttctg

SEQ ID NO: 83009 - DNA, 25 bp, Homo sapiens
gttccgtgcaactctgcgctctgta

SEQ ID NO: 83010 - DNA, 25 bp, Homo sapiens
tgggatgacaactttcgtagatacc

SEQ ID NO: 83011 - DNA, 25 bp, Homo sapiens
cctgcatcctcagacatggtgtata

SEQ ID NO: 83012 - DNA, 25 bp, Homo sapiens
tcttcctaaagaattgactctgcta

SEQ ID NO: 83013 - DNA, 25 bp, Homo sapiens
ccctcaaaagtaaaaagaacaaata

SEQ ID NO: 83014 - DNA, 25 bp, Homo sapiens
aactgcagctctttctcactacggg

SEQ ID NO: 83015 - DNA, 25 bp, Homo sapiens
ttgctctgtggctggtattaacctg

SEQ ID NO: 83016 - DNA, 25 bp, Homo sapiens
ctcgaacgctattctgcaaccaggg

SEQ ID NO: 83017 - DNA, 25 bp, Homo sapiens
tgccctccagtccacgaaaagtttc

SEQ ID NO: 83018 - DNA, 25 bp, Homo sapiens
ttggggaagccaactgatctactta

SEQ ID NO: 83019 - DNA, 25 bp, Homo sapiens
gcccgtgggtttgactttctacatc

SEQ ID NO: 83020 - DNA, 25 bp, Homo sapiens
tagcacattttatggtcacggtttc

SEQ ID NO: 83021 - DNA, 25 bp, Homo sapiens
cctcggcagtgcttatcataaagtt

SEQ ID NO: 83022 - DNA, 25 bp, Homo sapiens
gggtgtttagcatcacttcaaattc

SEQ ID NO: 83023 - DNA, 25 bp, Homo sapiens
aggatctcattaaaaattccatcct

SEQ ID NO: 83024 - DNA, 25 bp, Homo sapiens
cttctctgggtgtttggtgatctca

SEQ ID NO: 83025 - DNA, 25 bp, Homo sapiens
agaggcattcggctatacttacttc

SEQ ID NO: 83026 - DNA, 25 bp, Homo sapiens
ttgtcccaatggcaaacacctggaa

SEQ ID NO: 83027 - DNA, 25 bp, Homo sapiens
agcaacctggtatcttcgagatgga

SEQ ID NO: 83028 - DNA, 25 bp, Homo sapiens
gtcagattgctcagtttacggtcca

SEQ ID NO: 83029 - DNA, 25 bp, Homo sapiens
caaggctgagagagacaaacacatc

SEQ ID NO: 83030 - DNA, 25 bp, Homo sapiens
actacctctaggacagctgcattgg

SEQ ID NO: 83031 - DNA, 25 bp, Homo sapiens
cttgacggagacaggagaagctctt

SEQ ID NO: 83032 - DNA, 25 bp, Homo sapiens
ccagaaggcagggattgcatcatta

SEQ ID NO: 83033 - DNA, 25 bp, Homo sapiens
gcgccacatggctagcacggtattt

SEQ ID NO: 83034 - DNA, 25 bp, Homo sapiens
gggatgctctttcctgctttcagta

SEQ ID NO: 83035 - DNA, 25 bp, Homo sapiens
gatgtcagatcctgccctgccagtg

SEQ ID NO: 83036 - DNA, 25 bp, Homo sapiens
tgctgtggcagcacctcatttatgc

SEQ ID NO: 83037 - DNA, 25 bp, Homo sapiens
agccaagcaaatccaggtatacatg

SEQ ID NO: 83038 - DNA, 25 bp, Homo sapiens
ctgtcattcattaacttcgatggtg

SEQ ID NO: 83039 - DNA, 25 bp, Homo sapiens
cctcttcataaagggatgggtagca

SEQ ID NO: 83040 - DNA, 25 bp, Homo sapiens
gcgcagttgtctttggttaggatca

SEQ ID NO: 83041 - DNA, 25 bp, Homo sapiens
gtgaccggctccttgactcgatatt

SEQ ID NO: 83042 - DNA, 25 bp, Homo sapiens
gaggacttgatgacccagcagcaga

SEQ ID NO: 83043 - DNA, 25 bp, Homo sapiens
ggaggttctaacaaaggctgactta

SEQ ID NO: 83044 - DNA, 25 bp, Homo sapiens
ctctgcgacctgaggacactgtctc

SEQ ID NO: 83045 - DNA, 25 bp, Homo sapiens
caggagctcacatccctgatatgga

SEQ ID NO: 83046 - DNA, 25 bp, Homo sapiens
gcggcttccctcagctgacacaagg

SEQ ID NO: 83047 - DNA, 25 bp, Homo sapiens
gctctccaatcctgggaccactgtg

SEQ ID NO: 83048 - DNA, 25 bp, Homo sapiens
tcctgccgtggtacaaatgagcttg

SEQ ID NO: 83049 - DNA, 25 bp, Homo sapiens
atgcctcatgccattcctgcctggg

SEQ ID NO: 83050 - DNA, 25 bp, Homo sapiens
ctcatgcatgagatacccaaggctg

SEQ ID NO: 83051 - DNA, 25 bp, Homo sapiens
gtgaatccttcctcaggcctctggg

SEQ ID NO: 83052 - DNA, 25 bp, Homo sapiens
gagtctccatctgtcggattcccga

SEQ ID NO: 83053 - DNA, 25 bp, Homo sapiens
cagtgactccctctatggggcctca

SEQ ID NO: 83054 - DNA, 25 bp, Homo sapiens
atcttgcctcctcacagagcctggg

SEQ ID NO: 83055 - DNA, 25 bp, Homo sapiens
cagggttctgaccttgatgccagtc

SEQ ID NO: 83056 - DNA, 25 bp, Homo sapiens
caacaggggcggaaccagattctgc

SEQ ID NO: 83057 - DNA, 25 bp, Homo sapiens
tcactccagagtgcccagcagcttg

SEQ ID NO: 83058 - DNA, 25 bp, Homo sapiens
aaggaggcctctcccttctctctga

SEQ ID NO: 83059 - DNA, 25 bp, Homo sapiens
tggccacagtgaagtgcaacatgta

SEQ ID NO: 83060 - DNA, 25 bp, Homo sapiens
gcaattgataatgtgggcctttcca

SEQ ID NO: 83061 - DNA, 25 bp, Homo sapiens
ctttagaatctgaccagctgtattg

SEQ ID NO: 83062 - DNA, 25 bp, Homo sapiens
atggttgctttttacccagtgggca

SEQ ID NO: 83063 - DNA, 25 bp, Homo sapiens
gctacacctagttccaaaagacttg

SEQ ID NO: 83064 - DNA, 25 bp, Homo sapiens
cagcctgaacttagtcttgattctg

SEQ ID NO: 83065 - DNA, 25 bp, Homo sapiens
cagcctgaagagcaaaagagcaaca

SEQ ID NO: 83066 - DNA, 25 bp, Homo sapiens
cccaaactaatagcatgattttagc

SEQ ID NO: 83067 - DNA, 25 bp, Homo sapiens
tactaggacacataatggaaagatc

SEQ ID NO: 83068 - DNA, 25 bp, Homo sapiens
tttcccttagccctgtgtagagctg

SEQ ID NO: 83069 - DNA, 25 bp, Homo sapiens
ctttctgtagaagagctggaggcca

SEQ ID NO: 83070 - DNA, 25 bp, Homo sapiens
tggcaggtgtggcaaaaaagataag

SEQ ID NO: 83071 - DNA, 25 bp, Homo sapiens
ctatatgcagaatgggaaggccctc

SEQ ID NO: 83072 - DNA, 25 bp, Homo sapiens
ttctagtaatgacgctaaggcttgg

SEQ ID NO: 83073 - DNA, 25 bp, Homo sapiens
tccagtcagggatgaaatcaggttg

SEQ ID NO: 83074 - DNA, 25 bp, Homo sapiens
cagtgctttcagtcatttggctata

SEQ ID NO: 83075 - DNA, 25 bp, Homo sapiens
cactgggcggaacaaaacctggttt

SEQ ID NO: 83076 - DNA, 25 bp, Homo sapiens
tcgggcgtcgatttcatgtcagtca

SEQ ID NO: 83077 - DNA, 25 bp, Homo sapiens
tggagcctccttcacctggcacagg

SEQ ID NO: 83078 - DNA, 25 bp, Homo sapiens
ggttcagaagccatgtcctcaggtc

SEQ ID NO: 83079 - DNA, 25 bp, Homo sapiens
gcactgttcatgcttcgggcctgga

SEQ ID NO: 83080 - DNA, 25 bp, Homo sapiens
cccatcggccctgaatgaactgtca

SEQ ID NO: 83081 - DNA, 25 bp, Homo sapiens
gagttctgcattggtaccgctactg

SEQ ID NO: 83082 - DNA, 25 bp, Homo sapiens
aggtgccactttcctgtcctgtgaa

SEQ ID NO: 83083 - DNA, 25 bp, Homo sapiens
ccagggctcttacaggtcttcagtc

SEQ ID NO: 83084 - DNA, 25 bp, Homo sapiens
gtacggtgctcagtctctccaggaa

SEQ ID NO: 83085 - DNA, 25 bp, Homo sapiens
ttcctctgagcggaaacactgcggc

SEQ ID NO: 83086 - DNA, 25 bp, Homo sapiens
cgagtcccttcgttagcagttcatt

SEQ ID NO: 83087 - DNA, 25 bp, Homo sapiens
gttgcccaccagagatcagcctttg

SEQ ID NO: 83088 - DNA, 25 bp, Homo sapiens
ctctgcaaacctgtagtgggacata

SEQ ID NO: 83089 - DNA, 25 bp, Homo sapiens
tgggcctgaatgaaaatgaactgtc

SEQ ID NO: 83090 - DNA, 25 bp, Homo sapiens
ttgctggctgctacttttataatta

SEQ ID NO: 83091 - DNA, 25 bp, Homo sapiens
tgccttcgtcctgagccagatcctg

SEQ ID NO: 83092 - DNA, 25 bp, Homo sapiens
gcagcgctccacgtgcttcttctga

SEQ ID NO: 83093 - DNA, 25 bp, Homo sapiens
ctaggggaaatacagtgccaatatg

SEQ ID NO: 83094 - DNA, 25 bp, Homo sapiens
tggctacagctccaggtgaacagtc

SEQ ID NO: 83095 - DNA, 25 bp, Homo sapiens
acacaagcccaccacatacaggtta

SEQ ID NO: 83096 - DNA, 25 bp, Homo sapiens
gtgctcagagcccacacagctgtct

SEQ ID NO: 83097 - DNA, 25 bp, Homo sapiens
cctcaaggtccaagtggcctgtttc

SEQ ID NO: 83098 - DNA, 25 bp, Homo sapiens
caactctagggactggggatcaaac

SEQ ID NO: 83099 - DNA, 25 bp, Homo sapiens
gctctgtgggaagcaactgctctta

SEQ ID NO: 83100 - DNA, 25 bp, Homo sapiens
acaaagttctgaggcagcttagcgc

SEQ ID NO: 83101 - DNA, 25 bp, Homo sapiens
tccgggtctgccacgtgagactact

SEQ ID NO: 83102 - DNA, 25 bp, Homo sapiens
gggtacatacctacaccctcgtgta

SEQ ID NO: 83103 - DNA, 25 bp, Homo sapiens
aggcacatgggatcagagacctctg

SEQ ID NO: 83104 - DNA, 25 bp, Homo sapiens
tagtgctctctgtcgccacctaatg

SEQ ID NO: 83105 - DNA, 25 bp, Homo sapiens
caagcctgccttgttgggtagtaca

SEQ ID NO: 83106 - DNA, 25 bp, Homo sapiens
tacgacgcgttaggtggcctttaaa

SEQ ID NO: 83107 - DNA, 25 bp, Homo sapiens
gcttacagtagcccaagcaggtgca

SEQ ID NO: 83108 - DNA, 25 bp, Homo sapiens
agtgtgtttttaccttgcccagacc

SEQ ID NO: 83109 - DNA, 25 bp, Homo sapiens
gccctgggtcctggatccttacaaa

SEQ ID NO: 83110 - DNA, 25 bp, Homo sapiens
agcagttgtctcttctggctacaga

SEQ ID NO: 83111 - DNA, 25 bp, Homo sapiens
gctgcatgttcttctgtccctctta

SEQ ID NO: 83112 - DNA, 25 bp, Homo sapiens
aggatctccttttgcagatcacaaa

SEQ ID NO: 83113 - DNA, 25 bp, Homo sapiens
cttgggctctgctatcctggaaatg

SEQ ID NO: 83114 - DNA, 25 bp, Homo sapiens
atggccaactgcctacatgtaattg

SEQ ID NO: 83115 - DNA, 25 bp, Homo sapiens
gcatggtggctcatctctggtgaca

SEQ ID NO: 83116 - DNA, 25 bp, Homo sapiens
ttgtttaatttttaaatatttgggg

SEQ ID NO: 83117 - DNA, 25 bp, Homo sapiens
tttaccagcagtttgccctgacaga

SEQ ID NO: 83118 - DNA, 25 bp, Homo sapiens
tgtggaatgacttaaggatcctttc

SEQ ID NO: 83119 - DNA, 25 bp, Homo sapiens
gttgcagggcagaacacacatgtta

SEQ ID NO: 83120 - DNA, 25 bp, Homo sapiens
acccttcatgttttctatcgctctg

SEQ ID NO: 83121 - DNA, 25 bp, Homo sapiens
tagcctgatgtactgcaaatccttc

SEQ ID NO: 83122 - DNA, 25 bp, Homo sapiens
ggtcatccctacacttcaagttata

SEQ ID NO: 83123 - DNA, 25 bp, Homo sapiens
gcagaaataatggaaatgcctctta

SEQ ID NO: 83124 - DNA, 25 bp, Homo sapiens
caacatgtgtacgtgcttacaggca

SEQ ID NO: 83125 - DNA, 25 bp, Homo sapiens
tttgactccttttactgtacctgtg

SEQ ID NO: 83126 - DNA, 25 bp, Homo sapiens
tggaggccttggtctagaaagatac

SEQ ID NO: 83127 - DNA, 25 bp, Homo sapiens
cctcatggctctggacaggcttcta

SEQ ID NO: 83128 - DNA, 25 bp, Homo sapiens
tggggcccagggaacatctaagagt

SEQ ID NO: 83129 - DNA, 25 bp, Homo sapiens
tccagcagcagagggagattctcca

SEQ ID NO: 83130 - DNA, 25 bp, Homo sapiens
gcccacatacccttgtgtatttata

SEQ ID NO: 83131 - DNA, 25 bp, Homo sapiens
gcctccagggaaagaaatgaatgtt

SEQ ID NO: 83132 - DNA, 25 bp, Homo sapiens
cccggccttatacaagaagtctttt

SEQ ID NO: 83133 - DNA, 25 bp, Homo sapiens
tgtctgctgatagggctgcccatca

SEQ ID NO: 83134 - DNA, 25 bp, Homo sapiens
cagccctggactacactgctattta

SEQ ID NO: 83135 - DNA, 25 bp, Homo sapiens
acgggtactgtcctttgagaattcc

SEQ ID NO: 83136 - DNA, 25 bp, Homo sapiens
cagctttcaggagggtgtccttcta

SEQ ID NO: 83137 - DNA, 25 bp, Homo sapiens
ggcagtctcccttctttttcaagca

SEQ ID NO: 83138 - DNA, 25 bp, Homo sapiens
ggtcctgtcaacttcagaggcaata

SEQ ID NO: 83139 - DNA, 25 bp, Homo sapiens
cggctgactgcatgacactctccta

SEQ ID NO: 83140 - DNA, 25 bp, Homo sapiens
ccctcggggtccatacttagcaatg

SEQ ID NO: 83141 - DNA, 25 bp, Homo sapiens
ttttccggacggcttttaccacagc

SEQ ID NO: 83142 - DNA, 25 bp, Homo sapiens
tgttgttgctttcccaccctgcagc

SEQ ID NO: 83143 - DNA, 25 bp, Homo sapiens
acgggtttatttctgtggcctgaga

SEQ ID NO: 83144 - DNA, 25 bp, Homo sapiens
ggccgtcgtgacaatggcagccttc

SEQ ID NO: 83145 - DNA, 25 bp, Homo sapiens
gacgcgccgccatctttggtccagt

SEQ ID NO: 83146 - DNA, 25 bp, Homo sapiens
ctgcccgctggaccggaaaacgcac

SEQ ID NO: 83147 - DNA, 25 bp, Homo sapiens
agagactcttcttcctcggtccagg

SEQ ID NO: 83148 - DNA, 25 bp, Homo sapiens
ttttaggcgaggcaactagccagtg

SEQ ID NO: 83149 - DNA, 25 bp, Homo sapiens
ccgagactggaatgttgacctgatt

SEQ ID NO: 83150 - DNA, 25 bp, Homo sapiens
ttcccgtgaaggaccagagaggccc

SEQ ID NO: 83151 - DNA, 25 bp, Homo sapiens
tttggcagggcctccactgaatccc

SEQ ID NO: 83152 - DNA, 25 bp, Homo sapiens
ggcgctctaccgcactgatgagtga

SEQ ID NO: 83153 - DNA, 25 bp, Homo sapiens
ggccgccttgagcattttcttggta

SEQ ID NO: 83154 - DNA, 25 bp, Homo sapiens
tggggcagccttctttgcactttgg

SEQ ID NO: 83155 - DNA, 25 bp, Homo sapiens
gcccacctatctgagcggcagggta

SEQ ID NO: 83156 - DNA, 25 bp, Homo sapiens
ccctgccttacctctctggaaaaaa

SEQ ID NO: 83157 - DNA, 25 bp, Homo sapiens
ccctcaggtttgtggctatcagtga

SEQ ID NO: 83158 - DNA, 25 bp, Homo sapiens
aatccttaaccctagcgatggcttg

SEQ ID NO: 83159 - DNA, 25 bp, Homo sapiens
cccgttggaggttgatttgctgttt

SEQ ID NO: 83160 - DNA, 25 bp, Homo sapiens
cttaaggctacccagtgagtcgatg

SEQ ID NO: 83161 - DNA, 25 bp, Homo sapiens
ggaattcagcctccggggtccacag

SEQ ID NO: 83162 - DNA, 25 bp, Homo sapiens
cacctgatgaagaagcgggagaagc

SEQ ID NO: 83163 - DNA, 25 bp, Homo sapiens
aactataaaagtgataaagctgtac

SEQ ID NO: 83164 - DNA, 25 bp, Homo sapiens
ggtcccagggacttttgatatgatg

SEQ ID NO: 83165 - DNA, 25 bp, Homo sapiens
acatgcagttgtggtctttgttaca

SEQ ID NO: 83166 - DNA, 25 bp, Homo sapiens
agtcgactctcatttacccactgga

SEQ ID NO: 83167 - DNA, 25 bp, Homo sapiens
ggccttcctatcacgatggatatga

SEQ ID NO: 83168 - DNA, 25 bp, Homo sapiens
ccgcattgctgtacgtggttccttt

SEQ ID NO: 83169 - DNA, 25 bp, Homo sapiens
tcagggctcttttcagaggcagtca

SEQ ID NO: 83170 - DNA, 25 bp, Homo sapiens
acacctttggtgcagggtattctca

SEQ ID NO: 83171 - DNA, 25 bp, Homo sapiens
tccaaatggaggttgagttctcatc

SEQ ID NO: 83172 - DNA, 25 bp, Homo sapiens
agggctgaacgtgtactttggtctc

SEQ ID NO: 83173 - DNA, 25 bp, Homo sapiens
gtgaccctgggacataactgagttc

SEQ ID NO: 83174 - DNA, 25 bp, Homo sapiens
ggcaaagtgcctctcagccctgttt

SEQ ID NO: 83175 - DNA, 25 bp, Homo sapiens
tgacaaaggccttctaagcatggac

SEQ ID NO: 83176 - DNA, 25 bp, Homo sapiens
acccaaccagtatcttctatgctta

SEQ ID NO: 83177 - DNA, 25 bp, Homo sapiens
caaagggttctgagtgaaagtaaac

SEQ ID NO: 83178 - DNA, 25 bp, Homo sapiens
ggatgacctgggaacgtttttgaaa

SEQ ID NO: 83179 - DNA, 25 bp, Homo sapiens
ctggctcgatctccaccaagcggga

SEQ ID NO: 83180 - DNA, 25 bp, Homo sapiens
ggccgccgcactatctgtaagagga

SEQ ID NO: 83181 - DNA, 25 bp, Homo sapiens
ctacagtcttaaaaaaggggccatg

SEQ ID NO: 83182 - DNA, 25 bp, Homo sapiens
ctctctggaggcacagcatctatca

SEQ ID NO: 83183 - DNA, 25 bp, Homo sapiens
cagggtgccaggtgtattcataatc

SEQ ID NO: 83184 - DNA, 25 bp, Homo sapiens
acagcccggtcatagttgttgtacc

SEQ ID NO: 83185 - DNA, 25 bp, Homo sapiens
aatgggtttctgttttgcctaaggc

SEQ ID NO: 83186 - DNA, 25 bp, Homo sapiens
ttcaccaggctgttgacacccattg

SEQ ID NO: 83187 - DNA, 25 bp, Homo sapiens
ggctttcagttagatcaccattaca

SEQ ID NO: 83188 - DNA, 25 bp, Homo sapiens
gtgatcttaaaagaaatttgcccgt

SEQ ID NO: 83189 - DNA, 25 bp, Homo sapiens
cctatatatttgataacttatatga

SEQ ID NO: 83190 - DNA, 25 bp, Homo sapiens
ttttaaaatcgaaaaatatcaccgt

SEQ ID NO: 83191 - DNA, 25 bp, Homo sapiens
cagttcctcctacaagccaggggta

SEQ ID NO: 83192 - DNA, 25 bp, Homo sapiens
cctagctgtttggtcactgaggata

SEQ ID NO: 83193 - DNA, 25 bp, Homo sapiens
tgtttttctctcataggcagttgta

SEQ ID NO: 83194 - DNA, 25 bp, Homo sapiens
gcctggccatattgaaatttctgtg

SEQ ID NO: 83195 - DNA, 25 bp, Homo sapiens
gcagggttgttgatctctccatata

SEQ ID NO: 83196 - DNA, 25 bp, Homo sapiens
ggactccatttatatagtaagatga

SEQ ID NO: 83197 - DNA, 25 bp, Homo sapiens
cccacagggctcttgaaaataggta

SEQ ID NO: 83198 - DNA, 25 bp, Homo sapiens
agtgagacttgctgtaccattgttg

SEQ ID NO: 83199 - DNA, 25 bp, Homo sapiens
cacttgggatcactgggctagaaac

SEQ ID NO: 83200 - DNA, 25 bp, Homo sapiens
taagtggcttcacctgctgtgcaca

SEQ ID NO: 83201 - DNA, 25 bp, Homo sapiens
tggtaactaaagtggaactgctatc

SEQ ID NO: 83202 - DNA, 25 bp, Homo sapiens
caacaattgtacttttcttacaatt

SEQ ID NO: 83203 - DNA, 25 bp, Homo sapiens
gtaacaattttatttgaagagaaaa

SEQ ID NO: 83204 - DNA, 25 bp, Homo sapiens
aaaacaaagactttctatacatcag

SEQ ID NO: 83205 - DNA, 25 bp, Homo sapiens
ttaaaaactgctatacctgtacctc

SEQ ID NO: 83206 - DNA, 25 bp, Homo sapiens
cagctttgctgtcaaatatgactaa

SEQ ID NO: 83207 - DNA, 25 bp, Homo sapiens
cctcaactaggcctatggacatctg

SEQ ID NO: 83208 - DNA, 25 bp, Homo sapiens
tgagaaccctttccctagagtgaca

SEQ ID NO: 83209 - DNA, 25 bp, Homo sapiens
agataatctgtagcagaaactcttt

SEQ ID NO: 83210 - DNA, 25 bp, Homo sapiens
tccttttgctgactggaatccattc

SEQ ID NO: 83211 - DNA, 25 bp, Homo sapiens
gaccagtttactgttgtccacttta

SEQ ID NO: 83212 - DNA, 25 bp, Homo sapiens
ccagagtctgtagaccacagacaga

SEQ ID NO: 83213 - DNA, 25 bp, Homo sapiens
atagatctatgttaatggatgcaca

SEQ ID NO: 83214 - DNA, 25 bp, Homo sapiens
cataggtaaagtattccctcctgcc

SEQ ID NO: 83215 - DNA, 25 bp, Homo sapiens
ggcctactacctaactgaagcagtg

SEQ ID NO: 83216 - DNA, 25 bp, Homo sapiens
cagataggctgtgtggttctcaatg

SEQ ID NO: 83217 - DNA, 25 bp, Homo sapiens
gtggagctccacatgactagtgttc

SEQ ID NO: 83218 - DNA, 25 bp, Homo sapiens
ttttttggtcttgcaaaatcagttt

SEQ ID NO: 83219 - DNA, 25 bp, Homo sapiens
gggtgaggctgcatgcccttcataa

SEQ ID NO: 83220 - DNA, 25 bp, Homo sapiens
agcctcagtaatatatttatataaa

SEQ ID NO: 83221 - DNA, 25 bp, Homo sapiens
tgcactcagggcgttacataatcta

SEQ ID NO: 83222 - DNA, 25 bp, Homo sapiens
ttaacatttgttagtttctcataga

SEQ ID NO: 83223 - DNA, 25 bp, Homo sapiens
gtgctgccagaatagaggtagtttc

SEQ ID NO: 83224 - DNA, 25 bp, Homo sapiens
ttgctctgttggagaagtccctttc

SEQ ID NO: 83225 - DNA, 25 bp, Homo sapiens
cctgggatgctctcttcactctata

SEQ ID NO: 83226 - DNA, 25 bp, Homo sapiens
ggagggtgctgccatcatttgtaga

SEQ ID NO: 83227 - DNA, 25 bp, Homo sapiens
cacacacacacacgaaactcatatc

SEQ ID NO: 83228 - DNA, 25 bp, Homo sapiens
gccaaagaaaataagcaagtttcaa

SEQ ID NO: 83229 - DNA, 25 bp, Homo sapiens
taatactaacagcccagctctcaaa

SEQ ID NO: 83230 - DNA, 25 bp, Homo sapiens
ccaatacactgtcccctaaatgcta

SEQ ID NO: 83231 - DNA, 25 bp, Homo sapiens
agtgtttcttaagcatttttttacc

SEQ ID NO: 83232 - DNA, 25 bp, Homo sapiens
ttatcctaaagtagtggttttcaac

SEQ ID NO: 83233 - DNA, 25 bp, Homo sapiens
taaaagcatcagaggccacaccctg

SEQ ID NO: 83234 - DNA, 25 bp, Homo sapiens
aatacaatatttaaacactgtgagc

SEQ ID NO: 83235 - DNA, 25 bp, Homo sapiens
cccagggttgacaagcagaaataca

SEQ ID NO: 83236 - DNA, 25 bp, Homo sapiens
ctccgccagggttaaggtgagtacc

SEQ ID NO: 83237 - DNA, 25 bp, Homo sapiens
cccagggtccagatacagtgctaca

SEQ ID NO: 83238 - DNA, 25 bp, Homo sapiens
agtactcagaaaaggcaacaggttg

SEQ ID NO: 83239 - DNA, 25 bp, Homo sapiens
gtctgagagccatcatctttgacta

SEQ ID NO: 83240 - DNA, 25 bp, Homo sapiens
atctatcgtgggtaatggctggcaa

SEQ ID NO: 83241 - DNA, 25 bp, Homo sapiens
gctggttcccttgtgcatttataca

SEQ ID NO: 83242 - DNA, 25 bp, Homo sapiens
tcttggggtttccagcaaaacttta

SEQ ID NO: 83243 - DNA, 25 bp, Homo sapiens
tttttttatatcattaccaatgcct

SEQ ID NO: 83244 - DNA, 25 bp, Homo sapiens
aaaggactagatgctactatatata

SEQ ID NO: 83245 - DNA, 25 bp, Homo sapiens
ggtggtcctcactatcaagtcagta

SEQ ID NO: 83246 - DNA, 25 bp, Homo sapiens
ccactgcctttgctagaactccata

SEQ ID NO: 83247 - DNA, 25 bp, Homo sapiens
tgggtccagacgctagtccaatatg

SEQ ID NO: 83248 - DNA, 25 bp, Homo sapiens
tgatcagtttccctctggcaagaga

SEQ ID NO: 83249 - DNA, 25 bp, Homo sapiens
atgttttcagtgtcctgttttttta

SEQ ID NO: 83250 - DNA, 25 bp, Homo sapiens
tgtcatctgtgaaggtgcaaaactc

SEQ ID NO: 83251 - DNA, 25 bp, Homo sapiens
actgagactacaggggtgaactacc

SEQ ID NO: 83252 - DNA, 25 bp, Homo sapiens
ccgatgcctaactcagtcttgtaga

SEQ ID NO: 83253 - DNA, 25 bp, Homo sapiens
cctagcaggctactgaaaacctttg

SEQ ID NO: 83254 - DNA, 25 bp, Homo sapiens
gcccaaggttggcacccagatatca

SEQ ID NO: 83255 - DNA, 25 bp, Homo sapiens
ccagggaatttgtggtattgctagc

SEQ ID NO: 83256 - DNA, 25 bp, Homo sapiens
gcccgccttaggatagtgagattta

SEQ ID NO: 83257 - DNA, 25 bp, Homo sapiens
tgagagacactgcatgcctaagctg

SEQ ID NO: 83258 - DNA, 25 bp, Homo sapiens
ggcgaaagaacagcactcaatggta

SEQ ID NO: 83259 - DNA, 25 bp, Homo sapiens
cgaggttccctgtaaatattcattc

SEQ ID NO: 83260 - DNA, 25 bp, Homo sapiens
gaaataatagattacacatcttgat

SEQ ID NO: 83261 - DNA, 25 bp, Homo sapiens
ttctactgggatcatgaattacctc

SEQ ID NO: 83262 - DNA, 25 bp, Homo sapiens
taggtcttgagtaaggctcacttta

SEQ ID NO: 83263 - DNA, 25 bp, Homo sapiens
tccagggattaaggccagggctata

SEQ ID NO: 83264 - DNA, 25 bp, Homo sapiens
tctgcctactggtaatgtatacatc

SEQ ID NO: 83265 - DNA, 25 bp, Homo sapiens
gccacagcatgtctaaggttgattt

SEQ ID NO: 83266 - DNA, 25 bp, Homo sapiens
gtataatgcctcacaaacctgtttg

SEQ ID NO: 83267 - DNA, 25 bp, Homo sapiens
ggtggttcatatcccttcccttgtt

SEQ ID NO: 83268 - DNA, 25 bp, Homo sapiens
ccttcccagcttgcatgctttaata

SEQ ID NO: 83269 - DNA, 25 bp, Homo sapiens
cagtgtttctgaatattgtgtctta

SEQ ID NO: 83270 - DNA, 25 bp, Homo sapiens
gtttattattccataataatatgtg

SEQ ID NO: 83271 - DNA, 25 bp, Homo sapiens
gctcactttaggaatgatgttactc

SEQ ID NO: 83272 - DNA, 25 bp, Homo sapiens
ttcggctcatttgactgacaacttg

SEQ ID NO: 83273 - DNA, 25 bp, Homo sapiens
ccctcttatgaggagcaatatgtca

SEQ ID NO: 83274 - DNA, 25 bp, Homo sapiens
ggttgccaatttcccattatggtta

SEQ ID NO: 83275 - DNA, 25 bp, Homo sapiens
acctatcacctgaatttgtttattt

SEQ ID NO: 83276 - DNA, 25 bp, Homo sapiens
atttaagattgactcttagggtaaa

SEQ ID NO: 83277 - DNA, 25 bp, Homo sapiens
gggtgttctcaccatggcatttttg

SEQ ID NO: 83278 - DNA, 25 bp, Homo sapiens
gaggtggcctcaatactacttttta

SEQ ID NO: 83279 - DNA, 25 bp, Homo sapiens
atcccacattctctttacttatcca

SEQ ID NO: 83280 - DNA, 25 bp, Homo sapiens
ggcacctctgtgatatgtcccaaat

SEQ ID NO: 83281 - DNA, 25 bp, Homo sapiens
ggagggcattgttcatgtgttcatc

SEQ ID NO: 83282 - DNA, 25 bp, Homo sapiens
caactccccacaaaaaaatgggaaa

SEQ ID NO: 83283 - DNA, 25 bp, Homo sapiens
tccacatggacctaacaagaagttg

SEQ ID NO: 83284 - DNA, 25 bp, Homo sapiens
agctctgagatgtccctttccatta

SEQ ID NO: 83285 - DNA, 25 bp, Homo sapiens
agtctttcagcaggggtgcatttcc

SEQ ID NO: 83286 - DNA, 25 bp, Homo sapiens
caccctctttgggagttgttccaca

SEQ ID NO: 83287 - DNA, 25 bp, Homo sapiens
ccacattttcatattgcgatcgaca

SEQ ID NO: 83288 - DNA, 25 bp, Homo sapiens
cccagggaaccctaagatcaatgta

SEQ ID NO: 83289 - DNA, 25 bp, Homo sapiens
gacactgggtccttcatctggaaaa

SEQ ID NO: 83290 - DNA, 25 bp, Homo sapiens
gtttccctgttaaatgctgcatgtt

SEQ ID NO: 83291 - DNA, 25 bp, Homo sapiens
gaaactatctgtgcatctgttgatc

SEQ ID NO: 83292 - DNA, 25 bp, Homo sapiens
gggatccttctctgtacctgcactg

SEQ ID NO: 83293 - DNA, 25 bp, Homo sapiens
tctccctgtttgctagtgatatgaa

SEQ ID NO: 83294 - DNA, 25 bp, Homo sapiens
tcttggtcactgagaaacaacctta

SEQ ID NO: 83295 - DNA, 25 bp, Homo sapiens
cttaaaatttattgaagtgcatgta

SEQ ID NO: 83296 - DNA, 25 bp, Homo sapiens
gccgtatatgctttttgaatgattg

SEQ ID NO: 83297 - DNA, 25 bp, Homo sapiens
ggggccttttcaggttctttgattc

SEQ ID NO: 83298 - DNA, 25 bp, Homo sapiens
ttggcccagatccaaggtcattttc

SEQ ID NO: 83299 - DNA, 25 bp, Homo sapiens
tgtggagtctgctgactgcaaaata

SEQ ID NO: 83300 - DNA, 25 bp, Homo sapiens
tttttctatgtgtgtattatgaaat

SEQ ID NO: 83301 - DNA, 25 bp, Homo sapiens
ccacatttctgctgaagacctcaga

SEQ ID NO: 83302 - DNA, 25 bp, Homo sapiens
ctggaggcatcattacattagctgg

SEQ ID NO: 83303 - DNA, 25 bp, Homo sapiens
aggtatttcatatcgcttcacagga

SEQ ID NO: 83304 - DNA, 25 bp, Homo sapiens
ctgctagctgcttgtcccaaatgtg

SEQ ID NO: 83305 - DNA, 25 bp, Homo sapiens
gatggcccgtcatagttctttgata

SEQ ID NO: 83306 - DNA, 25 bp, Homo sapiens
gactggtgtctttcctgcaggagga

SEQ ID NO: 83307 - DNA, 25 bp, Homo sapiens
cctgcccatctttggtaatgacatg

SEQ ID NO: 83308 - DNA, 25 bp, Homo sapiens
gggcacctttgtcaactcaaaattg

SEQ ID NO: 83309 - DNA, 25 bp, Homo sapiens
ctcttccgtgaagcaaagtgtagta

SEQ ID NO: 83310 - DNA, 25 bp, Homo sapiens
tatgcaactgaggagggctttcacc

SEQ ID NO: 83311 - DNA, 25 bp, Homo sapiens
ctgggtgctagagtcaaaatcctgc

SEQ ID NO: 83312 - DNA, 25 bp, Homo sapiens
tttgatgtggaaggccaatggaatc

SEQ ID NO: 83313 - DNA, 25 bp, Homo sapiens
ccagcctaatgtccttgtggtaaga

SEQ ID NO: 83314 - DNA, 25 bp, Homo sapiens
tcctgatcatattgcctgtggaata

SEQ ID NO: 83315 - DNA, 25 bp, Homo sapiens
gtgggagtctaaacttggctgaatc

SEQ ID NO: 83316 - DNA, 25 bp, Homo sapiens
tggaccacttggacacatttcagaa

SEQ ID NO: 83317 - DNA, 25 bp, Homo sapiens
acacccaggtgtccggaattttata

SEQ ID NO: 83318 - DNA, 25 bp, Homo sapiens
tagtgctttaccctaagagtcaatc

SEQ ID NO: 83319 - DNA, 25 bp, Homo sapiens
aaatgataccaacagtaatttggat

SEQ ID NO: 83320 - DNA, 25 bp, Homo sapiens
caatatttctcttctgctctttctt

SEQ ID NO: 83321 - DNA, 25 bp, Homo sapiens
tgacatattgctcctcataagaggg

SEQ ID NO: 83322 - DNA, 25 bp, Homo sapiens
ggcctgtgccctagttttcaattaa

SEQ ID NO: 83323 - DNA, 25 bp, Homo sapiens
actgtgcagatccattgtcttcgta

SEQ ID NO: 83324 - DNA, 25 bp, Homo sapiens
atgggtgtttttgccacaatgacta

SEQ ID NO: 83325 - DNA, 25 bp, Homo sapiens
taccttccatttataagcaatcgaa

SEQ ID NO: 83326 - DNA, 25 bp, Homo sapiens
aggtagtcccacctagtgctatgca

SEQ ID NO: 83327 - DNA, 25 bp, Homo sapiens
gcctggatttgcatagtgcttttcc

SEQ ID NO: 83328 - DNA, 25 bp, Homo sapiens
cctgctgagcatgagacagaaaatt

SEQ ID NO: 83329 - DNA, 25 bp, Homo sapiens
taacattttaggaagtgcaggctca

SEQ ID NO: 83330 - DNA, 25 bp, Homo sapiens
cctgctggccctatgagtaagttaa

SEQ ID NO: 83331 - DNA, 25 bp, Homo sapiens
ccaggatatttgttggatgtgcata

SEQ ID NO: 83332 - DNA, 25 bp, Homo sapiens
gagattgccgttttctgacttctta

SEQ ID NO: 83333 - DNA, 25 bp, Homo sapiens
actggtaccctatatggattacata

SEQ ID NO: 83334 - DNA, 25 bp, Homo sapiens
gccacagtaagtcaatagggagttc

SEQ ID NO: 83335 - DNA, 25 bp, Homo sapiens
gactatcttatactcattaaacaga

SEQ ID NO: 83336 - DNA, 25 bp, Homo sapiens
actgcatggcatatgaactataacc

SEQ ID NO: 83337 - DNA, 25 bp, Homo sapiens
tgagtgctgttctttcgccttaata

SEQ ID NO: 83338 - DNA, 25 bp, Homo sapiens
cctgtgcccaggattgagttttgta

SEQ ID NO: 83339 - DNA, 25 bp, Homo sapiens
cacaggagcgctggctgatttattc

SEQ ID NO: 83340 - DNA, 25 bp, Homo sapiens
ccctccatgtgtagtgacgcaaaaa

SEQ ID NO: 83341 - DNA, 25 bp, Homo sapiens
tgtcccttaactgggtgctaaatgc

SEQ ID NO: 83342 - DNA, 25 bp, Homo sapiens
gcctgctaggacaagaatgtgattg

SEQ ID NO: 83343 - DNA, 25 bp, Homo sapiens
ggggaggtgctttgtacatttcatc

SEQ ID NO: 83344 - DNA, 25 bp, Homo sapiens
ccctgtagtctcagttccttgaacg

SEQ ID NO: 83345 - DNA, 25 bp, Homo sapiens
tgcctgttgcaagagccacttttaa

SEQ ID NO: 83346 - DNA, 25 bp, Homo sapiens
accagtggttttctctctcacaaga

SEQ ID NO: 83347 - DNA, 25 bp, Homo sapiens
ttagggcacaccactgcaaattgga

SEQ ID NO: 83348 - DNA, 25 bp, Homo sapiens
aaacagaactaggcacacatataaa

SEQ ID NO: 83349 - DNA, 25 bp, Homo sapiens
caaattaacatacacgtgtgtttgt

SEQ ID NO: 83350 - DNA, 25 bp, Homo sapiens
acagtggacttcgtaccttaggaca

SEQ ID NO: 83351 - DNA, 25 bp, Homo sapiens
gctgcctaatttctgttttcaatca

SEQ ID NO: 83352 - DNA, 25 bp, Homo sapiens
gatgcctcgttgttagtgaaattta

SEQ ID NO: 83353 - DNA, 25 bp, Homo sapiens
tcaggctttaaggtctaagcaaacc

SEQ ID NO: 83354 - DNA, 25 bp, Homo sapiens
tgtgttcctggaatcaacttcaaga

SEQ ID NO: 83355 - DNA, 25 bp, Homo sapiens
agggcccttgtacctatgccaaaga

SEQ ID NO: 83356 - DNA, 25 bp, Homo sapiens
gtagtcactgccttcttggaaacca

SEQ ID NO: 83357 - DNA, 25 bp, Homo sapiens
atcgctggcatctaaacatactttc

SEQ ID NO: 83358 - DNA, 25 bp, Homo sapiens
ccagggcctatggaagctgtcaatt

SEQ ID NO: 83359 - DNA, 25 bp, Homo sapiens
ggtatccatccattatttcagggtg

SEQ ID NO: 83360 - DNA, 25 bp, Homo sapiens
gtcctggcgtctcaaatgtctctca

SEQ ID NO: 83361 - DNA, 25 bp, Homo sapiens
attgacttttcaatgactaactgaa

SEQ ID NO: 83362 - DNA, 25 bp, Homo sapiens
gaacaagggctatcctgatctcaga

SEQ ID NO: 83363 - DNA, 25 bp, Homo sapiens
ctgtgaccttaaatacaggcaagtt

SEQ ID NO: 83364 - DNA, 25 bp, Homo sapiens
ctcagtatgtctctcagcaggcttc

SEQ ID NO: 83365 - DNA, 25 bp, Homo sapiens
catctgggtgatcaaggctgtcatc

SEQ ID NO: 83366 - DNA, 25 bp, Homo sapiens
ggggtcaagatttctgcctagatca

SEQ ID NO: 83367 - DNA, 25 bp, Homo sapiens
agccatgagagagatgtgaccgtca

SEQ ID NO: 83368 - DNA, 25 bp, Homo sapiens
gggattcttgaaggactgctcagtc

SEQ ID NO: 83369 - DNA, 25 bp, Homo sapiens
cctccttaactgtaaacagcttaca

SEQ ID NO: 83370 - DNA, 25 bp, Homo sapiens
caaaggaggtttctatacgaattta

SEQ ID NO: 83371 - DNA, 25 bp, Homo sapiens
ggctctatctatgtagcaggcaaga

SEQ ID NO: 83372 - DNA, 25 bp, Homo sapiens
tggttgtcatacaaaaagctgtaca

SEQ ID NO: 83373 - DNA, 25 bp, Homo sapiens
tccagccagccaaagaaagaaagtg

SEQ ID NO: 83374 - DNA, 25 bp, Homo sapiens
gaccaggctctgctagctttaaatg

SEQ ID NO: 83375 - DNA, 25 bp, Homo sapiens
ttagccctaacccagaaaatcagtg

SEQ ID NO: 83376 - DNA, 25 bp, Homo sapiens
ccctcttctgggtggtgaatactca

SEQ ID NO: 83377 - DNA, 25 bp, Homo sapiens
ggccgagctgccaataagtaatgaa

SEQ ID NO: 83378 - DNA, 25 bp, Homo sapiens
ataagccctttcctcatgtatcgtg

SEQ ID NO: 83379 - DNA, 25 bp, Homo sapiens
ggggccaatcaatttaacatacctg

SEQ ID NO: 83380 - DNA, 25 bp, Homo sapiens
tctgcttgagagtgtttcccatgtc

SEQ ID NO: 83381 - DNA, 25 bp, Homo sapiens
gcctgggtttcgtttctagtgtatc

SEQ ID NO: 83382 - DNA, 25 bp, Homo sapiens
ggctctgggacatgataatacttta

SEQ ID NO: 83383 - DNA, 25 bp, Homo sapiens
acttagctcttgccctagtgaaacc

SEQ ID NO: 83384 - DNA, 25 bp, Homo sapiens
cagctaaatttccaaatggcactta

SEQ ID NO: 83385 - DNA, 25 bp, Homo sapiens
caactggtttagtgacatggctgca

SEQ ID NO: 83386 - DNA, 25 bp, Homo sapiens
atattaccactatatttattattgt

SEQ ID NO: 83387 - DNA, 25 bp, Homo sapiens
ggtgtcacacacagccacttggata

SEQ ID NO: 83388 - DNA, 25 bp, Homo sapiens
aatgtaatctctcctgctgctggca

SEQ ID NO: 83389 - DNA, 25 bp, Homo sapiens
aggatagttccctgaccctttcagg

SEQ ID NO: 83390 - DNA, 25 bp, Homo sapiens
gctcagccacaacgtgttctcaaga

SEQ ID NO: 83391 - DNA, 25 bp, Homo sapiens
ttgggtaccctgcaaactcctctgg

SEQ ID NO: 83392 - DNA, 25 bp, Homo sapiens
atgtattttgccattatcatatcta

SEQ ID NO: 83393 - DNA, 25 bp, Homo sapiens
ttattttaaacacatcaatgccttt

SEQ ID NO: 83394 - DNA, 25 bp, Homo sapiens
tggcaaccagagtacacatggagtt

SEQ ID NO: 83395 - DNA, 25 bp, Homo sapiens
atccttgtcactgtctgcctgagta

SEQ ID NO: 83396 - DNA, 25 bp, Homo sapiens
ccgctgcacctggactatttttatg

SEQ ID NO: 83397 - DNA, 25 bp, Homo sapiens
atcgcttatagcatcagaggtcagg

SEQ ID NO: 83398 - DNA, 25 bp, Homo sapiens
acgctttggagctatggacacagga

SEQ ID NO: 83399 - DNA, 25 bp, Homo sapiens
ccaagtgtttgtcctctgaaccata

SEQ ID NO: 83400 - DNA, 25 bp, Homo sapiens
cgctggtgctggtcttgaatcaatt

SEQ ID NO: 83401 - DNA, 25 bp, Homo sapiens
ttgactgtcactccagaaagatgtg

SEQ ID NO: 83402 - DNA, 25 bp, Homo sapiens
acaggggtactatcaatgttcaaca

SEQ ID NO: 83403 - DNA, 25 bp, Homo sapiens
ggcatgtaataagcaccaatgttta

SEQ ID NO: 83404 - DNA, 25 bp, Homo sapiens
ctcaggctgagactctgagaattca

SEQ ID NO: 83405 - DNA, 25 bp, Homo sapiens
ctctcctagagtgtgctgcaaattc

SEQ ID NO: 83406 - DNA, 25 bp, Homo sapiens
gcaaggcatctttccgttatagtca

SEQ ID NO: 83407 - DNA, 25 bp, Homo sapiens
ttgctatggaacaactcctgagtga

SEQ ID NO: 83408 - DNA, 25 bp, Homo sapiens
gccttcagctcatttaccaccagtg

SEQ ID NO: 83409 - DNA, 25 bp, Homo sapiens
gcagacctcattggcttcagcctta

SEQ ID NO: 83410 - DNA, 25 bp, Homo sapiens
tctgctccggtttgctttactaaaa

SEQ ID NO: 83411 - DNA, 25 bp, Homo sapiens
acctggccatttgaggcttgaaata

SEQ ID NO: 83412 - DNA, 25 bp, Homo sapiens
ttctcccagagctgaagctgaattc

SEQ ID NO: 83413 - DNA, 25 bp, Homo sapiens
gccgacggttcaagtcctttcttta

SEQ ID NO: 83414 - DNA, 25 bp, Homo sapiens
gcttacgcagaatctatgaaaaatg

SEQ ID NO: 83415 - DNA, 25 bp, Homo sapiens
tccacgtgtatggagcttaagccac

SEQ ID NO: 83416 - DNA, 25 bp, Homo sapiens
acccctgcccccacctccacctgag

SEQ ID NO: 83417 - DNA, 25 bp, Homo sapiens
ccctgcccccacctccacctgagcc

SEQ ID NO: 83418 - DNA, 25 bp, Homo sapiens
ctgcccccacctccacctgagcccg

SEQ ID NO: 83419 - DNA, 25 bp, Homo sapiens
gcccccacctccacctgagcccgag

SEQ ID NO: 83420 - DNA, 25 bp, Homo sapiens
ccccacctccacctgagcccgagag

SEQ ID NO: 83421 - DNA, 25 bp, Homo sapiens
ccacctccacctgagcccgagagct

SEQ ID NO: 83422 - DNA, 25 bp, Homo sapiens
acctccacctgagcccgagagctcc

SEQ ID NO: 83423 - DNA, 25 bp, Homo sapiens
ctccacctgagcccgagagctccga

SEQ ID NO: 83424 - DNA, 25 bp, Homo sapiens
ccacctgagcccgagagctccgagg

SEQ ID NO: 83425 - DNA, 25 bp, Homo sapiens
acctgagcccgagagctccgaggac

SEQ ID NO: 83426 - DNA, 25 bp, Homo sapiens
ctgagcccgagagctccgaggaccc

SEQ ID NO: 83427 - DNA, 25 bp, Homo sapiens
gagcccgagagctccgaggacccca

SEQ ID NO: 83428 - DNA, 25 bp, Homo sapiens
gcccgagagctccgaggaccccacc

SEQ ID NO: 83429 - DNA, 25 bp, Homo sapiens
ccgagagctccgaggaccccaccag

SEQ ID NO: 83430 - DNA, 25 bp, Homo sapiens
gagagctccgaggaccccaccagcc

SEQ ID NO: 83431 - DNA, 25 bp, Homo sapiens
gagctccgaggaccccaccagcccc

SEQ ID NO: 83432 - DNA, 25 bp, Homo sapiens
gctccgaggaccccaccagcccccc

SEQ ID NO: 83433 - DNA, 25 bp, Homo sapiens
tccgaggaccccaccagcccccctg

SEQ ID NO: 83434 - DNA, 25 bp, Homo sapiens
cgaggaccccaccagcccccctgag

SEQ ID NO: 83435 - DNA, 25 bp, Homo sapiens
cccaccagcccccctgagccccagg

SEQ ID NO: 83436 - DNA, 25 bp, Homo sapiens
ccagcccccctgagccccaggactt

SEQ ID NO: 83437 - DNA, 25 bp, Homo sapiens
agcccccctgagccccaggacttga

SEQ ID NO: 83438 - DNA, 25 bp, Homo sapiens
cccccctgagccccaggacttgagc

SEQ ID NO: 83439 - DNA, 25 bp, Homo sapiens
cccctgagccccaggacttgagcag

SEQ ID NO: 83440 - DNA, 25 bp, Homo sapiens
cctgagccccaggacttgagcagca

SEQ ID NO: 83441 - DNA, 25 bp, Homo sapiens
tgagccccaggacttgagcagcagc

SEQ ID NO: 83442 - DNA, 25 bp, Homo sapiens
agccccaggacttgagcagcagcgt

SEQ ID NO: 83443 - DNA, 25 bp, Homo sapiens
ccccaggacttgagcagcagcgtct
